(19) United States
(12) Patent Application Publication
(10) Pub. No.: US 2019/0382759 A1
(43) Pub. Date: Dec. 19, 2019

(54) COMPOSITIONS AND METHODS FOR THE MODULATION OF ADAPTIVE IMMUNITY

(71) Applicant: Locana, Inc., San Diego, CA (US)

(72) Inventors: David A. NELLES, San Diego, CA (US); Ranjan BATRA, San Diego, CA (US); Gene YEO, San Diego, CA (US)

(21) Appl. No.: 16/434,787

(22) Filed: Jun. 7, 2019

Related U.S. Application Data
(60) Provisional application No. 62/682,276, filed on Jun. 8, 2018.

(51) Int. Cl. C12N 15/11; A61K 48/00

(52) U.S. Cl. CPC C12N 15/11; C12N 2310/20; A61K 48/005

(57) ABSTRACT

Disclosed are compositions and methods for simultaneously providing a gene therapy and preventing an adaptive immune response to a cell modified by the gene therapy by the immune system of a subject. In some embodiments, compositions of the disclosure modify a level of expression of an RNA molecule associated with a disease or disorder as well as inhibit expression or activity of a component of an adaptive immune response to mask the modified cell from a subject's immune system.

### RELATED APPLICATIONS

[0001] This application claims priority to U.S. Patent Application No. 62/682,276, filed Jun. 8, 2018, the contents of which are herein incorporated by reference in their entirety. The contents of International Application No. PCT/US2019/036021, filed Jun. 7, 2019, U.S. patent application Ser. No. 16/434,689, filed Jun. 7, 2019, and U.S. Patent Application No. 62/682,271, filed Jun. 8, 2018, are herein incorporated by reference in their entirety.

### FIELD OF THE DISCLOSURE

[0002] The disclosure is directed to molecular biology, and more, specifically, to compositions and methods for modifying expression and activity of RNA molecules involved in an adaptive immune response.

### INCORPORATION OF SEQUENCE LISTING

[0003] The contents of the text file named “LOCN_003_001 US_SeqList_ST25”, which was created on Jun. 6, 2019 and is 2.93 MB in size, are hereby incorporated by reference in their entirety.

### BACKGROUND

[0004] There has been a long-felt but unmet need in the art for simultaneously providing a gene therapy and suppressing the adaptive immune response that may arise when the gene therapy is delivered by, for example, a viral vector. The disclosure provides compositions and methods for specifically targeting RNA molecules in a sequence-specific manner that provides a gene therapy in vivo while masking the modified cells from the immune system of a subject, thereby preventing an adaptive immune response to the modified cell.

### SUMMARY

[0005] The disclosure provides a composition comprising a nucleic acid sequence comprising a guide RNA (gRNA) sequence that specifically binds a target RNA sequence, wherein the target RNA sequence encodes a protein component of an adaptive immune response, and wherein the gRNA sequence comprises a spacer sequence comprising a portion of a nucleic acid sequence encoding the protein component, and wherein the protein component is selected from the group consisting of Beta-2-microglobulin (β2M), Human Leukocyte Antigen A (HLA-A), Human Leukocyte Antigen B (HLA-B), Human Leukocyte Antigen C (HLA-C), Cluster of Differentiation 28 (CD28), Cluster of Differentiation 80 (CD80), Cluster of Differentiation 86 (CD86), Inducible T-cell Costimulator (ICOS), ICOS Ligand (ICOSLG), OX40L, Interleukin 12 (IL 12), and CC Chemokine Receptor 7 (CCR7).

[0006] The disclosure also provides a composition comprising (a) a first sequence comprising a guide RNA (gRNA) that specifically binds a target sequence within an RNA molecule, wherein the target sequence comprises a sequence encoding a component of an adaptive immune response and (b) a sequence encoding a fusion protein, the sequence comprising a sequence encoding a first RNA-binding polypeptide and a sequence encoding a second RNA-binding polypeptide, wherein neither the first RNA-binding polypeptide nor the second RNA-binding polypeptide comprises a significant DNA-nuclease activity, wherein the first RNA-binding polypeptide and the second RNA-binding polypeptide are not identical, and wherein the second RNA-binding polypeptide comprises an RNA-nuclease activity.

[0007] The disclosure provides a composition comprising: (a) a first sequence comprising a guide RNA (gRNA) that specifically binds a first target sequence within a first RNA molecule, wherein the first target sequence comprises a sequence encoding a component of an adaptive immune response and (b) a second sequence comprising a second guide RNA (gRNA) that specifically binds a second target sequence within a second RNA molecule and (c) a sequence encoding a fusion protein, the sequence comprising a sequence encoding a first RNA-binding polypeptide and a sequence encoding a second RNA-binding polypeptide, wherein neither the first RNA-binding polypeptide nor the second RNA-binding polypeptide comprises a significant DNA-nuclease activity, wherein the first RNA-binding polypeptide and the second RNA-binding polypeptide are not identical, and wherein the second RNA-binding polypeptide comprises an RNA-nuclease activity.

[0008] In some embodiments of the compositions of the disclosure, including those wherein the composition comprises a first sequence comprising a first guide RNA (gRNA) that specifically binds a first target sequence within a first RNA molecule, wherein the first target sequence comprises a sequence encoding a component of an adaptive immune response and a second sequence comprising a second guide RNA (gRNA) that specifically binds a second target sequence within a second RNA molecule, the first target sequence or the second target sequence comprises at least one repeated sequence.

[0009] In some embodiments of the compositions of the disclosure, including those wherein the composition comprises a first sequence comprising a first guide RNA (gRNA) that specifically binds a first target sequence within a first RNA molecule, wherein the first target sequence comprises a sequence encoding a component of an adaptive immune response and a second sequence comprising a second guide RNA (gRNA) that specifically binds a second target sequence within a second RNA molecule, the first sequence comprising a first promoter capable of expressing the gRNA in a eukaryotic cell and/or the second sequence comprising a second promoter capable of expressing the gRNA in a eukaryotic cell. In some embodiments, the first promoter and the second promoter are identical. In some embodiments, the first promoter and the second promoter are not identical.

[0010] In some embodiments of the compositions of the disclosure, including those wherein the composition comprises a first sequence comprising a first guide RNA (gRNA) that specifically binds a first target sequence within a first RNA molecule, wherein the first target sequence comprises a sequence encoding a component of an adaptive immune response, and a second sequence comprising a second guide RNA (gRNA) that specifically binds a second target sequence within a second RNA molecule, the first sequence and second sequence comprising a promoter capable of expressing the first gRNA and the second gRNA in a eukaryotic cell.

[0011] In some embodiments of the compositions of the disclosure, including those wherein a gRNA sequence comprises a promoter capable of expressing the gRNA in a eukaryotic cell, the eukaryotic cell is an animal cell. In some embodiments, the animal cell is a mammalian cell. In some embodiments, the animal cell is a human cell.

[0012] In some embodiments of the compositions of the disclosure, including those wherein a gRNA sequence comprises a promoter capable of expressing the gRNA in a eukaryotic cell, the promoter is a constitutively active promoter.

[0013] In some embodiments of the compositions of the disclosure, including those wherein a gRNA sequence comprises a promoter capable of expressing the gRNA in a eukaryotic cell, the gRNA sequence comprises a sequence isolated or derived from a promoter capable of driving expression of an RNA polymerase. In some embodiments, the promoter sequence is isolated or derived from a U6 promoter.

[0014] In some embodiments of the compositions of the disclosure, including those wherein a gRNA sequence comprises a promoter capable of expressing the gRNA in a eukaryotic cell, the promoter comprises a sequence isolated or derived from a promoter capable of driving expression of a transfer RNA (tRNA). In some embodiments, the promoter sequence is isolated or derived from an alanine tRNA promoter, an arginine tRNA promoter, an asparagine tRNA promoter, an aspartic acid tRNA promoter, a cysteine tRNA promoter, a glutamine tRNA promoter, a glutamic acid tRNA promoter, a glycine tRNA promoter, a histidine tRNA promoter, an isoleucine tRNA promoter, a leucine tRNA promoter, a lysine tRNA promoter, a methionine tRNA promoter, a phenylalanine tRNA promoter, a proline tRNA promoter, a serine tRNA promoter, a threonine tRNA promoter, a tryptophan tRNA promoter, a tyrosine tRNA promoter, or a valine tRNA promoter. In some embodiments, the promoter sequence is isolated or derived from a valine tRNA promoter.

[0015] In some embodiments of the compositions of the disclosure, including those wherein the composition comprises a first sequence comprising a first guide RNA (gRNA) that specifically binds a first target sequence within a first RNA molecule, wherein the first target sequence comprises a sequence encoding a component of an adaptive immune response and a second sequence comprising a second guide RNA (gRNA) that specifically binds a second target sequence within a second RNA molecule, the sequence comprising the first gRNA further comprises a first spacer sequence that specifically binds to the first target RNA sequence. In some embodiments, the first spacer sequence has at least 50%, 55%, 60%, 65%, 70%, 75%, 80%, 87%, 90%, 95%, 97%, 99% or any percentage in between of complementarity to the first target RNA sequence. In some embodiments, the first spacer sequence has 100% complementarity to the target RNA sequence. In some embodiments, the first spacer sequence comprises or consists of 20 nucleotides. In some embodiments, the first spacer sequence comprises or consists of 21 nucleotides. In some embodiments, the first spacer sequence comprises or consists of 20 nucleotides of an amino acid sequence encoding a Beta-2-microglobulin (β2M) protein. In some embodiments, the first spacer sequence comprises or consists of 20 nucleotides of an amino acid sequence of

(SEQ ID NO: 88)

MSRSVALAVL ALLSLSGLEA IQRTPKIQVY SRHPADIEVD
LLKNGERIEK VEHSDLSFSK DWSFYLLYYT EFTPTEKDEY
ACRVNHVTLS QPKIVKWDRD M.

[0016] In some embodiments of the compositions of the disclosure, including those wherein the composition comprises a first sequence comprising a first guide RNA (gRNA) that specifically binds a first target sequence within a first RNA molecule, wherein the first target sequence comprises a sequence encoding a component of an adaptive immune response and a second sequence comprising a second guide RNA (gRNA) that specifically binds a second target sequence within a second RNA molecule, the sequence comprising the first gRNA further comprises a first scaffold sequence that specifically binds to the first RNA binding protein. In some embodiments, the first scaffold sequence comprises a stem-loop structure. In some embodiments, the scaffold sequence comprises or consists of 90 nucleotides. In some embodiments, the scaffold sequence comprises or consists of 93 nucleotides. In some embodiments, the scaffold sequence comprises the sequence

(SEQ ID NO: 12)

GUUUAAGAGCUAUGCUGGAAACAGCAUAGCAAGUUUAAAUAAGGCUAGUC
CGUUAUCAACUUGAAAAAGUGGCACCGAGUCGGUGCUUUUUUU
or

(SEQ ID NO: 13)

GUUUUAGAGCUAGAAAUAGCAAGUUAAAAUAAGGCUAGUCCGUUAUCAAC
UUGAAAAAGUGGCACCGAGUCGGUGCUUUUUUU.

[0017] In some embodiments of the compositions of the disclosure, including those wherein the composition comprises a first sequence comprising a first guide RNA (gRNA) that specifically binds a first target sequence within a first RNA molecule, wherein the first target sequence comprises a sequence encoding a component of an adaptive immune response and a second sequence comprising a second guide RNA (gRNA) that specifically binds a second target sequence within a second RNA molecule, the sequence comprising the second gRNA further comprises a second spacer sequence that specifically binds to the second target RNA sequence. In some embodiments, the second spacer sequence has at least 50%, 55%, 60%, 65%, 70%, 75%, 80%, 87%, 90%, 95%, 97%, 99% or any percentage in between of complementarity to the first target RNA sequence. In some embodiments, the second spacer sequence has 100% complementarity to the target RNA sequence. In some embodiments, the second spacer sequence comprises or consists of 20 nucleotides. In some embodiments, the second spacer sequence comprises or consists of 21 nucleotides. In some embodiments, the second spacer sequence comprises or further comprises a sequence comprising at least 1, 2, 3, 4, 5, 6, or 7 repeats of the sequence CUG (SEQ ID NO: 18), CCUG (SEQ ID NO: 19), CAG (SEQ ID NO: 80), GGGGCC (SEQ ID NO: 81) or any combination thereof.

[0018] In some embodiments of the compositions of the disclosure, including those wherein the composition comprises a first sequence comprising a first guide RNA (gRNA) that specifically binds a first target sequence within a first RNA molecule, wherein the first target sequence comprises a sequence encoding a component of an adaptive immune response and a second sequence comprising a second guide RNA (gRNA) that specifically binds a second target sequence within a second RNA molecule, the sequence comprising the second gRNA further comprises a second scaffold sequence that specifically binds to the first RNA binding protein. In some embodiments, the second scaffold sequence comprises a stem-loop structure. In some embodiments, the scaffold sequence comprises or consists of 85 nucleotides. In some embodiments, the scaffold sequence comprises the sequence

(SEQ ID NO: 12)

GUUUAAGAGCUAUGCUGGAAACAGCAUAGCAAGUUUAAAUAAGGCUAGU
CCGUUAUCAACUUGAAAAAGUGGCACCGAGUCGGUGCUUUUUUU
or

(SEQ ID NO: 13)

GUUUUAGAGCUAGAAAUAGCAAGUUAAAAUAAGGCUAGUCCGUUAUCAA
CUUGAAAAAGUGGCACCGAGUCGGUGCUUUUUUU.

[0019] In some embodiments of the compositions of the disclosure, the gRNA does not bind or does not selectively bind to a second sequence within the RNA molecule.

[0020] In some embodiments of the compositions of the disclosure, including those wherein the composition comprises a first sequence comprising a first guide RNA (gRNA) that specifically binds a first target sequence within a first RNA molecule, wherein the first target sequence comprises a sequence encoding a component of an adaptive immune response and a second sequence comprising a second guide RNA (gRNA) that specifically binds a second target sequence within a second RNA molecule, the first gRNA does not bind or does not selectively bind to a second sequence within the first RNA molecule.

[0021] In some embodiments of the compositions of the disclosure, including those wherein the composition comprises a first sequence comprising a first guide RNA (gRNA) that specifically binds a first target sequence within a first RNA molecule, wherein the first target sequence comprises a sequence encoding a component of an adaptive immune response and a second sequence comprising a second guide RNA (gRNA) that specifically binds a second target sequence within a second RNA molecule, the second gRNA does not bind or does not selectively bind to a second sequence within the second RNA molecule.

[0022] In some embodiments of the compositions of the disclosure, an RNA genome or an RNA transcriptome comprises the RNA molecule.

[0023] In some embodiments of the compositions of the disclosure, including those wherein the composition comprises a first sequence comprising a first guide RNA (gRNA) that specifically binds a first target sequence within a first RNA molecule, wherein the first target sequence comprises a sequence encoding a component of an adaptive immune response and a second sequence comprising a second guide RNA (gRNA) that specifically binds a second target sequence within a second RNA molecule, an RNA genome or an RNA transcriptome comprises the first RNA molecule or the second RNA molecule.

[0024] In some embodiments of the compositions of the disclosure, including those wherein the composition comprises a first sequence comprising a first guide RNA (gRNA) that specifically binds a first target sequence within a first RNA molecule, wherein the first target sequence comprises a sequence encoding a component of an adaptive immune response and a second sequence comprising a second guide RNA (gRNA) that specifically binds a second target sequence within a second RNA molecule, the first RNA binding protein comprises a CRISPR-Cas protein. In some embodiments, the CRISPR-Cas protein is a Type II CRISPR-Cas protein. In some embodiments, the first RNA binding protein comprises a Cas9 polypeptide or an RNA-binding portion thereof. In some embodiments, the CRISPR-Cas protein is a Type V CRISPR-Cas protein. In some embodiments, the first RNA binding protein comprises a Cpf1 polypeptide or an RNA-binding portion thereof. In some embodiments, the CRISPR-Cas protein is a Type VI CRISPR-Cas protein. In some embodiments, the first RNA binding protein comprises a Cas13 polypeptide or an RNA-binding portion thereof. In some embodiments, the CRISPR-Cas protein comprises a native RNA nuclease activity. In some embodiments, the native RNA nuclease activity is reduced or inhibited. In some embodiments, the native RNA nuclease activity is increased or induced. In some embodiments, the CRISPR-Cas protein comprises a native DNA nuclease activity and wherein the native DNA nuclease activity is inhibited. In some embodiments, the CRISPR-Cas protein comprises a mutation. In some embodiments, a nuclease domain of the CRISPR-Cas protein comprises the mutation. In some embodiments, the mutation occurs in a nucleic acid encoding the CRISPR-Cas protein. In some embodiments, the mutation occurs in an amino acid encoding the CRISPR-Cas protein. In some embodiments, the mutation comprises a substitution, an insertion, a deletion, a frameshift, an inversion, or a transposition. In some embodiments, the mutation comprises a deletion of a nuclease domain, a binding site within the nuclease domain, an active site within the nuclease domain, or at least one essential amino acid residue within the nuclease domain.

[0025] In some embodiments of the compositions of the disclosure, including those wherein the composition comprises a first sequence comprising a first guide RNA (gRNA) that specifically binds a first target sequence within a first RNA molecule, wherein the first target sequence comprises a sequence encoding a component of an adaptive immune response and a second sequence comprising a second guide RNA (gRNA) that specifically binds a second target sequence within a second RNA molecule, the first RNA binding protein comprises a Pumilio and FBF (PUF) protein or an RNA binding portion thereof. In some embodiments, the first RNA binding protein comprises a Pumilio-based assembly (PUMBY) protein or an RNA binding portion thereof.

[0026] In some embodiments of the compositions of the disclosure, including those wherein the composition comprises a first sequence comprising a first guide RNA (gRNA) that specifically binds a first target sequence within a first RNA molecule, wherein the first target sequence comprises a sequence encoding a component of an adaptive immune response and a second sequence comprising a second guide RNA (gRNA) that specifically binds a second target sequence within a second RNA molecule, the first RNA binding protein does not require multimerization for RNA-binding activity. In some embodiments, the first RNA binding protein is not a monomer of a multimer complex. In some embodiments, a multimer protein complex does not comprise the first RNA binding protein.

[0027] In some embodiments of the compositions of the disclosure, including those wherein the composition comprises a first sequence comprising a first guide RNA (gRNA) that specifically binds a first target sequence within a first RNA molecule, wherein the first target sequence comprises a sequence encoding a component of an adaptive immune response and a second sequence comprising a second guide RNA (gRNA) that specifically binds a second target sequence within a second RNA molecule, the first RNA binding protein selectively binds to a target sequence within the RNA molecule. In some embodiments, the first RNA binding protein does not comprise an affinity for a second sequence within the RNA molecule. In some embodiments, the first RNA binding protein does not comprise a high affinity for or selectively bind a second sequence within the RNA molecule. In some embodiments, an RNA genome or an RNA transcriptome comprises the RNA molecule.

[0028] In some embodiments of the compositions of the disclosure, including those wherein the composition comprises a first sequence comprising a first guide RNA (gRNA) that specifically binds a first target sequence within a first RNA molecule, wherein the first target sequence comprises a sequence encoding a component of an adaptive immune response and a second sequence comprising a second guide RNA (gRNA) that specifically binds a second target sequence within a second RNA molecule, the first RNA binding protein comprises between 2 and 1300 amino acids, inclusive of the endpoints.

[0029] In some embodiments of the compositions of the disclosure, including those wherein the composition comprises a first sequence comprising a first guide RNA (gRNA) that specifically binds a first target sequence within a first RNA molecule, wherein the first target sequence comprises a sequence encoding a component of an adaptive immune response and a second sequence comprising a second guide RNA (gRNA) that specifically binds a second target sequence within a second RNA molecule, the sequence encoding the first RNA binding protein further comprises a sequence encoding a nuclear localization signal (NLS). In some embodiments, the sequence encoding a nuclear localization signal (NLS) is positioned 3′ to the sequence encoding the first RNA binding protein. In some embodiments, the first RNA binding protein comprises an NLS at a C-terminus of the protein.

[0030] In some embodiments of the compositions of the disclosure, including those wherein the composition comprises a first sequence comprising a first guide RNA (gRNA) that specifically binds a first target sequence within a first RNA molecule, wherein the first target sequence comprises a sequence encoding a component of an adaptive immune response and a second sequence comprising a second guide RNA (gRNA) that specifically binds a second target sequence within a second RNA molecule, the sequence encoding the first RNA binding protein further comprises a first sequence encoding a first NLS and a second sequence encoding a second NLS. In some embodiments, the sequence encoding the first NLS or the second NLS is positioned 3′ to the sequence encoding the first RNA binding protein. In some embodiments, the first RNA binding protein comprises the first NLS or the second NLS at a C-terminus of the protein.

[0031] In some embodiments of the compositions of the disclosure, including those wherein the composition comprises a first sequence comprising a first guide RNA (gRNA) that specifically binds a first target sequence within a first RNA molecule, wherein the first target sequence comprises a sequence encoding a component of an adaptive immune response and a second sequence comprising a second guide RNA (gRNA) that specifically binds a second target sequence within a second RNA molecule, the second RNA binding protein comprises or consists of a nuclease domain. In some embodiments, the second RNA binding protein comprises or consists of an RNAse. In some embodiments, the second RNA binding protein comprises or consists of an RNAse1. In some embodiments, the RNAse1 protein comprises or consists of SEQ ID NO: 20. In some embodiments, the second RNA binding protein comprises or consists of an RNAse4. In some embodiments, the RNAse4 protein comprises or consists of SEQ ID NO: 21. In some embodiments, the second RNA binding protein comprises or consists of an RNAse6. In some embodiments, the RNAse6 protein comprises or consists of SEQ ID NO: 22. In some embodiments, the second RNA binding protein comprises or consists of an RNAse7. In some embodiments, the RNAse7 protein comprises or consists of SEQ ID NO: 23. In some embodiments, the second RNA binding protein comprises or consists of an RNAse8. In some embodiments, the RNAse8 protein comprises or consists of SEQ ID NO: 24. In some embodiments, the second RNA binding protein comprises or consists of an RNAse2. In some embodiments, the RNAse2 comprises or consists of SEQ ID NO: 25. In some embodiments, the second RNA binding protein comprises or consists of an RNAse6PL. In some embodiments, the RNAse6PL protein comprises or consists of SEQ ID NO: 26. In some embodiments, the second RNA binding protein comprises or consists of an RNAseL. In some embodiments, the RNAseL protein comprises or consists of SEQ ID NO: 27. In some embodiments, the second RNA binding protein comprises or consists of an RNAseT2. In some embodiments, the RNAseT2 protein comprises or consists of SEQ ID NO: 28. In some embodiments, the second RNA binding protein comprises or consists of an RNAse11. In some embodiments, the RNAse11 protein comprises or consists of SEQ ID NO: 29. In some embodiments, the second RNA binding protein comprises or consists of an RNAseT2-like. In some embodiments, the RNAseT2-like protein comprises or consists of SEQ ID NO: 30.

[0032] In some embodiments of the compositions of the disclosure, including those wherein the composition comprises a first sequence comprising a first guide RNA (gRNA) that specifically binds a first target sequence within a first RNA molecule, wherein the first target sequence comprises a sequence encoding a component of an adaptive immune response and a second sequence comprising a second guide RNA (gRNA) that specifically binds a second target sequence within a second RNA molecule, the second RNA binding protein comprises or consists of a NOB1 polypeptide. In some embodiments, the NOB1 polypeptide comprises or consists of SEQ ID NO: 31.

[0033] In some embodiments of the compositions of the disclosure, including those wherein the composition comprises a first sequence comprising a first guide RNA (gRNA) that specifically binds a first target sequence within a first RNA molecule, wherein the first target sequence comprises a sequence encoding a component of an adaptive immune response and a second sequence comprising a second guide RNA (gRNA) that specifically binds a second target sequence within a second RNA molecule, the second RNA binding protein comprises or consists of an endonuclease. In some embodiments, the second RNA binding protein comprises or consists of an endonuclease V (ENDOV. In some embodiments, the ENDOV comprises or consists of SEQ ID NO: 32. In some embodiments, the second RNA binding protein comprises or consists of an endonuclease G (ENDOG). In some embodiments, the ENDOG comprises or consists of SEQ ID NO: 33. In some embodiments, the second RNA binding protein comprises or consists of an endonuclease D1 (ENDOD1). In some embodiments, the ENDOD1 comprises or consists of SEQ ID NO: 34.

[0034] In some embodiments of the compositions of the disclosure, including those wherein the composition comprises a first sequence comprising a first guide RNA (gRNA) that specifically binds a first target sequence within a first RNA molecule, wherein the first target sequence comprises a sequence encoding a component of an adaptive immune response and a second sequence comprising a second guide RNA (gRNA) that specifically binds a second target sequence within a second RNA molecule, the second RNA binding protein comprises or consists of a Human flap endonuclease-1 (hFEN1). In some embodiments, the hFEN1 comprises or consists of SEQ ID NO: 35.

[0035] In some embodiments of the compositions of the disclosure, including those wherein the composition comprises a first sequence comprising a first guide RNA (gRNA) that specifically binds a first target sequence within a first RNA molecule, wherein the first target sequence comprises a sequence encoding a component of an adaptive immune response and a second sequence comprising a second guide RNA (gRNA) that specifically binds a second target sequence within a second RNA molecule, the second RNA binding protein comprises or consists of a human Schlafen 14 (hSLFN14) polypeptide. In some embodiments, the hSLFN14 comprises or consists of SEQ ID NO: 36.

[0036] In some embodiments of the compositions of the disclosure, including those wherein the composition comprises a first sequence comprising a first guide RNA (gRNA) that specifically binds a first target sequence within a first RNA molecule, wherein the first target sequence comprises a sequence encoding a component of an adaptive immune response and a second sequence comprising a second guide RNA (gRNA) that specifically binds a second target sequence within a second RNA molecule, the second RNA binding protein comprises or consists of a human beta-lactamase-like protein 2 (hLACTB2) polypeptide. In some embodiments, the hLACTB2 comprises or consists of SEQ ID NO: 37.

[0037] In some embodiments of the compositions of the disclosure, including those wherein the composition comprises a first sequence comprising a first guide RNA (gRNA) that specifically binds a first target sequence within a first RNA molecule, wherein the first target sequence comprises a sequence encoding a component of an adaptive immune response and a second sequence comprising a second guide RNA (gRNA) that specifically binds a second target sequence within a second RNA molecule, the second RNA binding protein comprises or consists of an apurinic/apyrimidinic (AP) endodeoxyribonuclease (APEX2) polypeptide. In some embodiments, the APEX2 comprises or consists of SEQ ID NO: 38. In some embodiments, the APEX2 comprises or consists of SEQ ID NO: 39.

[0038] In some embodiments of the compositions of the disclosure, including those wherein the composition comprises a first sequence comprising a first guide RNA (gRNA) that specifically binds a first target sequence within a first RNA molecule, wherein the first target sequence comprises a sequence encoding a component of an adaptive immune response and a second sequence comprising a second guide RNA (gRNA) that specifically binds a second target sequence within a second RNA molecule, the second RNA binding protein comprises or consists of an angiogenin (ANG) polypeptide. In some embodiments, the ANG comprises or consists of SEQ ID NO: 40.

[0039] In some embodiments of the compositions of the disclosure, including those wherein the composition comprises a first sequence comprising a first guide RNA (gRNA) that specifically binds a first target sequence within a first RNA molecule, wherein the first target sequence comprises a sequence encoding a component of an adaptive immune response and a second sequence comprising a second guide RNA (gRNA) that specifically binds a second target sequence within a second RNA molecule, the second RNA binding protein comprises or consists of a heat responsive protein 12 (HRSP12) polypeptide. In some embodiments, the HRSP12 comprises or consists of SEQ ID NO: 41.

[0040] In some embodiments of the compositions of the disclosure, including those wherein the composition comprises a first sequence comprising a first guide RNA (gRNA) that specifically binds a first target sequence within a first RNA molecule, wherein the first target sequence comprises a sequence encoding a component of an adaptive immune response and a second sequence comprising a second guide RNA (gRNA) that specifically binds a second target sequence within a second RNA molecule, the second RNA binding protein comprises or consists of a Zinc Finger CCCH-Type Containing 12A (ZC3H12A). In some embodiments, the ZC3H12A comprises or consists of SEQ ID NO: 42. In some embodiments, the ZC3H12A comprises or consists of SEQ ID NO: 43.

[0041] In some embodiments of the compositions of the disclosure, including those wherein the composition comprises a first sequence comprising a first guide RNA (gRNA) that specifically binds a first target sequence within a first RNA molecule, wherein the first target sequence comprises a sequence encoding a component of an adaptive immune response and a second sequence comprising a second guide RNA (gRNA) that specifically binds a second target sequence within a second RNA molecule, the second RNA binding protein comprises or consists of a Reactive Intermediate Imine Deaminase A (RIDA) polypeptide. In some embodiments, the RIDA polypeptide comprises or consists of SEQ ID NO: 44.

[0042] In some embodiments of the compositions of the disclosure, including those wherein the composition comprises a first sequence comprising a first guide RNA (gRNA) that specifically binds a first target sequence within a first RNA molecule, wherein the first target sequence comprises a sequence encoding a component of an adaptive immune response and a second sequence comprising a second guide RNA (gRNA) that specifically binds a second target sequence within a second RNA molecule, the second RNA binding protein comprises or consists of a Phospholipase D Family Member 6 (PDL6) polypeptide. In some embodiments, the PDL6 polypeptide comprises or consists of SEQ ID NO: 126.

[0043] In some embodiments of the compositions of the disclosure, including those wherein the composition comprises a first sequence comprising a first guide RNA (gRNA) that specifically binds a first target sequence within a first RNA molecule, wherein the first target sequence comprises a sequence encoding a component of an adaptive immune response and a second sequence comprising a second guide RNA (gRNA) that specifically binds a second target sequence within a second RNA molecule, the second RNA binding protein comprises or consists of a Endonuclease III-like protein 1 (NTHL) polypeptide. In some embodiments, the NTHL polypeptide comprises or consists of SEQ ID NO: 123.

[0044] In some embodiments of the compositions of the disclosure, including those wherein the composition comprises a first sequence comprising a first guide RNA (gRNA) that specifically binds a first target sequence within a first RNA molecule, wherein the first target sequence comprises a sequence encoding a component of an adaptive immune response and a second sequence comprising a second guide RNA (gRNA) that specifically binds a second target sequence within a second RNA molecule, the second RNA binding protein comprises or consists of a Mitochondrial ribonuclease P catalytic subunit (KIAA0391) polypeptide. In some embodiments, the KIAA0391 polypeptide comprises or consists of SEQ ID NO: 127.

[0045] In some embodiments of the compositions of the disclosure, including those wherein the composition comprises a first sequence comprising a first guide RNA (gRNA) that specifically binds a first target sequence within a first RNA molecule, wherein the first target sequence comprises a sequence encoding a component of an adaptive immune response and a second sequence comprising a second guide RNA (gRNA) that specifically binds a second target sequence within a second RNA molecule, the second RNA binding protein comprises or consists of an apurinic or apyrimidinic site lyase (APEX1) polypeptide. In some embodiments, the APEX1 polypeptide comprises or consists of SEQ ID NO: 125.

[0046] In some embodiments of the compositions of the disclosure, including those wherein the composition comprises a first sequence comprising a first guide RNA (gRNA) that specifically binds a first target sequence within a first RNA molecule, wherein the first target sequence comprises a sequence encoding a component of an adaptive immune response and a second sequence comprising a second guide RNA (gRNA) that specifically binds a second target sequence within a second RNA molecule, the second RNA binding protein comprises or consists of an argonaute 2 (AGO2) polypeptide. In some embodiments, encoding the AGO2 polypeptide comprises or consists of SEQ ID NO: 128.

[0047] In some embodiments of the compositions of the disclosure, including those wherein the composition comprises a first sequence comprising a first guide RNA (gRNA) that specifically binds a first target sequence within a first RNA molecule, wherein the first target sequence comprises a sequence encoding a component of an adaptive immune response and a second sequence comprising a second guide RNA (gRNA) that specifically binds a second target sequence within a second RNA molecule, the second RNA binding protein comprises or consists of a mitochondrial nuclease EXOG (EXOG) polypeptide. In some embodiments, the EXOG polypeptide comprises or consists of SEQ ID NO: 129.

[0048] In some embodiments of the compositions of the disclosure, including those wherein the composition comprises a first sequence comprising a first guide RNA (gRNA) that specifically binds a first target sequence within a first RNA molecule, wherein the first target sequence comprises a sequence encoding a component of an adaptive immune response and a second sequence comprising a second guide RNA (gRNA) that specifically binds a second target sequence within a second RNA molecule, the second RNA binding protein comprises or consists of a Zinc Finger CCCH-Type Containing 12D (ZC3H12D) polypeptide. In some embodiments, the ZC3H12D polypeptide comprises or consists of SEQ ID NO: 130.

[0049] In some embodiments of the compositions of the disclosure, including those wherein the composition comprises a first sequence comprising a first guide RNA (gRNA) that specifically binds a first target sequence within a first RNA molecule, wherein the first target sequence comprises a sequence encoding a component of an adaptive immune response and a second sequence comprising a second guide RNA (gRNA) that specifically binds a second target sequence within a second RNA molecule, the second RNA binding protein comprises or consists of an endoplasmic reticulum to nucleus signaling 2 (ERN2) polypeptide. In some embodiments, the ERN2 polypeptide comprises or consists of SEQ ID NO: 131.

[0050] In some embodiments of the compositions of the disclosure, including those wherein the composition comprises a first sequence comprising a first guide RNA (gRNA) that specifically binds a first target sequence within a first RNA molecule, wherein the first target sequence comprises a sequence encoding a component of an adaptive immune response and a second sequence comprising a second guide RNA (gRNA) that specifically binds a second target sequence within a second RNA molecule, the second RNA binding protein comprises or consists of a pelota mRNA surveillance and ribosome rescue factor (PELO) polypeptide. In some embodiments, the PELO polypeptide comprises or consists of SEQ ID NO: 132.

[0051] In some embodiments of the compositions of the disclosure, including those wherein the composition comprises a first sequence comprising a first guide RNA (gRNA) that specifically binds a first target sequence within a first RNA molecule, wherein the first target sequence comprises a sequence encoding a component of an adaptive immune response and a second sequence comprising a second guide RNA (gRNA) that specifically binds a second target sequence within a second RNA molecule, the second RNA binding protein comprises or consists of a YBEY metallopeptidase (YBEY) polypeptide. In some embodiments, the YBEY polypeptide comprises or consists of SEQ ID NO: 133.

[0052] In some embodiments of the compositions of the disclosure, including those wherein the composition comprises a first sequence comprising a first guide RNA (gRNA) that specifically binds a first target sequence within a first RNA molecule, wherein the first target sequence comprises a sequence encoding a component of an adaptive immune response and a second sequence comprising a second guide RNA (gRNA) that specifically binds a second target sequence within a second RNA molecule the second RNA binding protein comprises or consists of a cleavage and polyadenylation specific factor 4 like (CPSF4L) polypeptide. In some embodiments, the CPSF4L polypeptide comprises or consists of SEQ ID NO: 134.

[0053] In some embodiments of the compositions of the disclosure, including those wherein the composition comprises a first sequence comprising a first guide RNA (gRNA) that specifically binds a first target sequence within a first RNA molecule, wherein the first target sequence comprises a sequence encoding a component of an adaptive immune response and a second sequence comprising a second guide RNA (gRNA) that specifically binds a second target sequence within a second RNA molecule, the second RNA binding protein comprises or consists of an hCG_2002731polypeptide. In some embodiments, the hCG_2002731 polypeptide comprises or consists of SEQ ID NO: 135. In some embodiments, the sequence encoding the hCG_2002731 polypeptide comprises or consists of SEQ ID NO: 136.

[0054] In some embodiments of the compositions of the disclosure, including those wherein the composition comprises a first sequence comprising a first guide RNA (gRNA) that specifically binds a first target sequence within a first RNA molecule, wherein the first target sequence comprises a sequence encoding a component of an adaptive immune response and a second sequence comprising a second guide RNA (gRNA) that specifically binds a second target sequence within a second RNA molecule, the second RNA binding protein comprises or consists of an Excision Repair Cross-Complementation Group 1 (ERCC1) polypeptide. In some embodiments, the ERCC1 polypeptide comprises or consists of SEQ ID NO: 137.

[0055] In some embodiments of the compositions of the disclosure, including those wherein the composition comprises a first sequence comprising a first guide RNA (gRNA) that specifically binds a first target sequence within a first RNA molecule, wherein the first target sequence comprises a sequence encoding a component of an adaptive immune response and a second sequence comprising a second guide RNA (gRNA) that specifically binds a second target sequence within a second RNA molecule, the second RNA binding protein comprises or consists of a ras-related C3 botulinum toxin substrate 1 isoform (RAC1) polypeptide. In some embodiments, the RAC1 polypeptide comprises or consists of SEQ ID NO: 138.

[0056] In some embodiments of the compositions of the disclosure, including those wherein the composition comprises a first sequence comprising a first guide RNA (gRNA) that specifically binds a first target sequence within a first RNA molecule, wherein the first target sequence comprises a sequence encoding a component of an adaptive immune response and a second sequence comprising a second guide RNA (gRNA) that specifically binds a second target sequence within a second RNA molecule, the second RNA binding protein comprises or consists of a Ribonuclease A A1 (RAA1) polypeptide. In some embodiments, the RAA1 polypeptide comprises or consists of SEQ ID NO: 139.

[0057] In some embodiments of the compositions of the disclosure, including those wherein the composition comprises a first sequence comprising a first guide RNA (gRNA) that specifically binds a first target sequence within a first RNA molecule, wherein the first target sequence comprises a sequence encoding a component of an adaptive immune response and a second sequence comprising a second guide RNA (gRNA) that specifically binds a second target sequence within a second RNA molecule, the second RNA binding protein comprises or consists of a Ras Related Protein (RAB1) polypeptide. In some embodiments, the RAB1 polypeptide comprises or consists of SEQ ID NO: 140.

[0058] In some embodiments of the compositions of the disclosure, including those wherein the composition comprises a first sequence comprising a first guide RNA (gRNA) that specifically binds a first target sequence within a first RNA molecule, wherein the first target sequence comprises a sequence encoding a component of an adaptive immune response and a second sequence comprising a second guide RNA (gRNA) that specifically binds a second target sequence within a second RNA molecule, the second RNA binding protein comprises or consists of a DNA Replication Helicase/Nuclease 2 (DNA2) polypeptide. In some embodiments, the DNA2 polypeptide comprises or consists of SEQ ID NO: 141.

[0059] In some embodiments of the compositions of the disclosure, including those wherein the composition comprises a first sequence comprising a first guide RNA (gRNA) that specifically binds a first target sequence within a first RNA molecule, wherein the first target sequence comprises a sequence encoding a component of an adaptive immune response and a second sequence comprising a second guide RNA (gRNA) that specifically binds a second target sequence within a second RNA molecule, the second RNA binding protein comprises or consists of a FLJ35220 polypeptide. In some embodiments, the FLJ35220 polypeptide comprises or consists of SEQ ID NO: 142.

[0060] In some embodiments of the compositions of the disclosure, including those wherein the composition comprises a first sequence comprising a first guide RNA (gRNA) that specifically binds a first target sequence within a first RNA molecule, wherein the first target sequence comprises a sequence encoding a component of an adaptive immune response and a second sequence comprising a second guide RNA (gRNA) that specifically binds a second target sequence within a second RNA molecule, the second RNA binding protein comprises or consists of a FLJ13173 polypeptide. In some embodiments, the FLJ13173 polypeptide comprises or consists of SEQ ID NO: 143.

[0061] In some embodiments of the compositions of the disclosure, including those wherein the composition comprises a first sequence comprising a first guide RNA (gRNA) that specifically binds a first target sequence within a first RNA molecule, wherein the first target sequence comprises a sequence encoding a component of an adaptive immune response and a second sequence comprising a second guide RNA (gRNA) that specifically binds a second target sequence within a second RNA molecule the second RNA binding protein comprises or consists of a DNA repair endonuclease XPF (ERCC4) polypeptide. In some embodiments, the ERCC4 polypeptide comprises or consists of SEQ ID NO: 124.

[0062] In some embodiments of the compositions of the disclosure, including those wherein the composition comprises a first sequence comprising a first guide RNA (gRNA) that specifically binds a first target sequence within a first RNA molecule, wherein the first target sequence comprises a sequence encoding a component of an adaptive immune response and a second sequence comprising a second guide RNA (gRNA) that specifically binds a second target sequence within a second RNA molecule, the second RNA binding protein comprises or consists of a mutated Rnase1 (Rnase1(K41R)) polypeptide. In some embodiments, the Rnase1(K41R) polypeptide comprises or consists of SEQ ID NO: 116.

[0063] In some embodiments of the compositions of the disclosure, including those wherein the composition comprises a first sequence comprising a first guide RNA (gRNA) that specifically binds a first target sequence within a first RNA molecule, wherein the first target sequence comprises a sequence encoding a component of an adaptive immune response and a second sequence comprising a second guide RNA (gRNA) that specifically binds a second target sequence within a second RNA molecule, the second RNA binding protein comprises or consists of a mutated Rnase1 (Rnase1(K41R, D121E)) polypeptide. In some embodiments, the Rnase1 (Rnase1(K41R, D121E)) polypeptide comprises or consists of SEQ ID NO: 117).

[0064] In some embodiments of the compositions of the disclosure, including those wherein the composition comprises a first sequence comprising a first guide RNA (gRNA) that specifically binds a first target sequence within a first RNA molecule, wherein the first target sequence comprises a sequence encoding a component of an adaptive immune response and a second sequence comprising a second guide RNA (gRNA) that specifically binds a second target sequence within a second RNA molecule, the second RNA binding protein comprises or consists of a mutated Rnase1 (Rnase1(K41R, D121E, H119N)) polypeptide. In some embodiments, the Rnase1 (Rnase1(K41R, D121E, H119N)) polypeptide comprises or consists of SEQ ID NO: 118.

[0065] In some embodiments of the compositions of the disclosure, including those wherein the composition comprises a first sequence comprising a first guide RNA (gRNA) that specifically binds a first target sequence within a first RNA molecule, wherein the first target sequence comprises a sequence encoding a component of an adaptive immune response and a second sequence comprising a second guide RNA (gRNA) that specifically binds a second target sequence within a second RNA molecule, the second RNA binding protein comprises or consists of a mutated Rnase1 (Rnase1(H119N)) polypeptide. In some embodiments, the Rnase1 (Rnase1(H119N)) polypeptide comprises or consists of SEQ ID NO: 119.

[0066] In some embodiments of the compositions of the disclosure, including those wherein the composition comprises a first sequence comprising a first guide RNA (gRNA) that specifically binds a first target sequence within a first RNA molecule, wherein the first target sequence comprises a sequence encoding a component of an adaptive immune response and a second sequence comprising a second guide RNA (gRNA) that specifically binds a second target sequence within a second RNA molecule, the second RNA binding protein comprises or consists of a mutated Rnase1 (Rnase1(R39D, N67D, N88A, G89D, R91D, H119N)) polypeptide. In some embodiments, the Rnase1 (Rnase1(R39D, N67D, N88A, G89D, R91D, H119N)) polypeptide comprises or consists of SEQ ID NO: 120.

[0067] In some embodiments of the compositions of the disclosure, including those wherein the composition comprises a first sequence comprising a first guide RNA (gRNA) that specifically binds a first target sequence within a first RNA molecule, wherein the first target sequence comprises a sequence encoding a component of an adaptive immune response and a second sequence comprising a second guide RNA (gRNA) that specifically binds a second target sequence within a second RNA molecule, the second RNA binding protein comprises or consists of a mutated Rnase1 (Rnase1(R39D, N67D, N88A, G89D, R91D, H119N)) polypeptide. In some embodiments, the Rnase1 (Rnase1(R39D, N67D, N88A, G89D, R91D, H119N, K41R, D121E)) polypeptide comprises or consists of SEQ ID NO: 121.

[0068] In some embodiments of the compositions of the disclosure, including those wherein the composition comprises a first sequence comprising a first guide RNA (gRNA) that specifically binds a first target sequence within a first RNA molecule, wherein the first target sequence comprises a sequence encoding a component of an adaptive immune response and a second sequence comprising a second guide RNA (gRNA) that specifically binds a second target sequence within a second RNA molecule, the second RNA binding protein comprises or consists of a mutated Rnase1 (Rnase1(R39D, N67D, N88A, G89D, R91D, H119N)) polypeptide. In some embodiments, the Rnase1 (Rnase1(R39D, N67D, N88A, G89D, R91D)) polypeptide comprises or consists of SEQ ID NO: 122.

[0069] In some embodiments of the compositions of the disclosure, including those wherein the composition comprises a first sequence comprising a first guide RNA (gRNA) that specifically binds a first target sequence within a first RNA molecule, wherein the first target sequence comprises a sequence encoding a component of an adaptive immune response and a second sequence comprising a second guide RNA (gRNA) that specifically binds a second target sequence within a second RNA molecule, the second RNA binding protein comprises or consists of a Teneurin Transmembrane Protein 1 (TENM1) polypeptide. In some embodiments, the TENM1 polypeptide comprises or consists of SEQ ID NO: 144.

[0070] In some embodiments of the compositions of the disclosure, including those wherein the composition comprises a first sequence comprising a first guide RNA (gRNA) that specifically binds a first target sequence within a first RNA molecule, wherein the first target sequence comprises a sequence encoding a component of an adaptive immune response and a second sequence comprising a second guide RNA (gRNA) that specifically binds a second target sequence within a second RNA molecule, the second RNA binding protein comprises or consists of a Teneurin Transmembrane Protein 1 (TENM2) polypeptide. In some embodiments, the TENM2 polypeptide comprises or consists of SEQ ID NO: 145.

[0071] In some embodiments of the compositions of the disclosure, including those wherein the composition comprises a first sequence comprising a first guide RNA (gRNA) that specifically binds a first target sequence within a first RNA molecule, wherein the first target sequence comprises a sequence encoding a component of an adaptive immune response and a second sequence comprising a second guide RNA (gRNA) that specifically binds a second target sequence within a second RNA molecule, the second RNA binding protein comprises or consists of a Ribonuclease Kappa (RNAseK) polypeptide. In some embodiments, the RNAseK protein comprises or consists of SEQ ID NO: 204.

[0072] In some embodiments of the compositions of the disclosure, including those wherein the composition comprises a first sequence comprising a first guide RNA (gRNA) that specifically binds a first target sequence within a first RNA molecule, wherein the first target sequence comprises a sequence encoding a component of an adaptive immune response and a second sequence comprising a second guide RNA (gRNA) that specifically binds a second target sequence within a second RNA molecule, the second RNA binding protein comprises or consists of a transcription activator-like effector nuclease (TALEN) polypeptide or a nuclease domain thereof. In some embodiments, the TALEN polypeptide comprises or consists of:

| (SEQ ID NO: 205) | |
|---|---|
| 1 | MRIGKSSGWL NESVSLEYEH VSPPTRPRDT RRRPRAAGDG GLAHLHRRLA VGYAEDTPRT |
| 61 | EARSPAPRRP LPVAPASAPP APSLVPEPPM PVSLPAVSSP RFSAGSSAAI TDPFPSLPPT |
| 121 | PVLYAMAREL EALSDATWQP AVPLPAEPPT DARRGNTVFD EASASSPVIA SACPQAFASP |
| 181 | PRAPRSARAR RARTGGDAWP APTFLSRPSS SRIGRDVFGK LVALGYSREQ IRKLKQESLS |
| 241 | EIAKYHTTLT GQGFTHADIC RISRRRQSLR VVARNYPELA AALPELTRAH IVDIARQRSG |
| 301 | DLALQALLPV ATALTAAPLR LSASQIATVA QYGERPAIQA LYRLRRKLTR APLHLTPQQV |
| 361 | VAIASNTGGK RALEAVCVQL PVLRAAPYRL STEQVVAIAS NKGGKQALEA VKAHLLDLLG |
| 421 | APYVLDTEQV VAIASHNGGK QALEAVKADL LDLRGAPYAL STEQVVAIAS HNGGKQALEA |
| 481 | VKADLLELRG APYALSTEQV VAIASHNGGK QALEAVKAHL LDLRGVPYAL STEQVVAIAS |
| 541 | HNGGKQALEA VKAQLLDLRG APYALSTAQV VAIASNGGGK QALEGIGEQL LKLRTAPYGL |
| 601 | STEQVVAIAS HDGGKQALEA VGAQLVALRA APYALSTEQV VAIASNKGGK QALEAVKAQL |
| 661 | LELRGAPYAL STAQVVAIAS HDGGNQALEA VGTQLVALRA APYALSTEQV VAIASHDGGK |
| 721 | QALEAVGAQL VALRAAPYAL NTEQVVAIAS SHGGKQALEA VRALFPDLRA APYALSTAQL |
| 781 | VAIASNPGGK QALEAVRALF RELRAAPYAL STEQVVAIAS NHGGKQALEA VRALFRGLRA |
| 841 | APYGLSTAQV VAIASSNGGK QALEAVWALL PVLRATPYDL NTAQIVAIAS HDGGKPALEA |
| 901 | VWAKLPVLRG APYALSTAQV VAIACISGQQ ALEAIEAHMP TLRQASHSLS PERVAAIACI |
| 961 | GGRSAVEAVR QGLPVKAIRR IRREKAPVAG PPPASLGPTP QELVAVLHFF RAHQQPRQAF |
| 1021 | VDALAAFQAT RPALLRLLSS VGVTEIEALG GTIPDATERW QRLLGRLGFR PATGAAAPSP |
| 1081 | DSLQGFAQSL ERTLGSPGMA GQSACSPHRK RPAETAIAPR SIRRSPNNAG QPSEPWPDQL |
| 1141 | AWLQRRKRTA RSHIRADSAA SVPANLHLGT RAQFTPDRLR AEPGPIMQAH TSPASVSFGS |
| 1201 | HVAFEPGLPD PGTPTSADLA SFEAEPFGVG PLDFHLDWLL QILET. |

[0073] In some embodiments, the TALEN polypeptide comprises or consists of:

| (SEQ ID NO: 206) | |
|---|---|
| 1 | mdpirsrtps parellpgpq pdrvqptadr ggappaggpl dglparrtms rtrlpsppap |
| 61 | spafsagsfs dllrqfdpsl ldtslldsmp avgtphtaaa paecdevqsg lraaddpppt |
| 121 | vrvavtaarp prakpaprrr aaqpsdaspa aqvdlrtlgy sqqqqekikp kvgstvaqhh |
| 181 | ealvghgfth ahivalsrhp aalgtvavky qdmiaalpea thedivgvgk qwsgaralea |
| 241 | lltvagelrg pplqldtgql vkiakrggvt aveavhasrn altgaplnlt paqvvaiasn |
| 301 | nggkqaletv qrllpvlcqa hgltpaqvva iashdggkqa letmqrllpv lcqahglppd |
| 361 | qvvaiasnig gkqaletvqr llpvlcqahg ltpdqvvaia shgggkqale tvqrllpvlc |
| 421 | qahgltpdqv vaiashdggk qaletvqrll pvlcqahglt pdqvvaiasn gggkqaletv |
| 481 | qrllpvlcqa hgltpdqvva iasnggkqal etvqrllpvl cqahgltpdq vvaiashdgg |
| 541 | kqaletvqrl lpvlcqthgl tpaqvvaias hdggkqalet vqqllpvlcq ahgltpdqvv |
| 601 | aiasniggkq alatvqrllp vlcqahgltp dqvvaiasng ggkqaletvq rllpvlcqah |
| 661 | gltpdqvvai asngggkqal etvqrllpvl cqahgltqvq vvaiasnigg kqaletvqrl |
| 721 | lpvlcqahgl tpaqvvaias hdggkqalet vqrllpvlcq ahgltpdqvv aiasngggkq |
| 781 | aletvqrllp vlcqahgltq eqvvaiasnn ggkqaletvq rllpvlcqah gltpdqvvai |
| 841 | asngggkqal etvqrllpvl cqahgltpaq vvaiasnigg kqaletvqrl lpvlcqdhgl |
| 901 | tlaqvvaias niggkqalet vqrllpvlcq ahgltqdqvv aiasniggkq aletvqrllp |
| 961 | vlcqdhgltp dqvvaiasni ggkqaletvq rllpvlcqdh gltldqvvai asnggkqale |
| 1021 | tvqrllpvlc qdhgltpdqv vaiasnsggk qaletvqrll pvlcqdhglt pnqvvaiasn |
| 1081 | ggkqalesiv aqlsrpdpal aaltndhlva laclggrpam davkkglpha pelirrvnrr |
| 1141 | igertshrva dyaqvvrvle ffqchshpay afdeamtqfg msrnglvqlf rrvgvtelea |
| 1201 | rggtlppasq rwdrilqasg mkrakpspts aqtpdqaslh afadslerdl dapspmhegd |
| 1261 | qtgassrkrs rsdravtgps aqhsfevrvp eqrdalhlpl swrvkrprtr iggglpdpgt |
| 1321 | piaadlaass tvmweqdaap fagaaddfpa fneeelawlm ellpqsgsvg gti. |

[0074] In some embodiments of the compositions of the disclosure, including those wherein the composition comprises a first sequence comprising a first guide RNA (gRNA) that specifically binds a first target sequence within a first RNA molecule, wherein the first target sequence comprises a sequence encoding a component of an adaptive immune response and a second sequence comprising a second guide RNA (gRNA) that specifically binds a second target sequence within a second RNA molecule, the second RNA binding protein comprises or consists of a zinc finger nuclease polypeptide or a nuclease domain thereof. In some embodiments, the second RNA binding protein comprises or consists of a ZNF638 polypeptide or a nuclease domain thereof. In some embodiments, the ZNF638 polypeptide polypeptide comprises or consists of:

(SEQ ID NO: 207)

| | |
|---|---|
| 1 | MSRPRFNPRG DFPLQRPRAP NPSGMRPPGP FMRPGSMGLP RFYPAGRARG IPHRFAGHES |
| 61 | YQNMGPQRMN VQVTQHRTDP RLTKEKLDFH EAQQKKGKPH GSRWDDEPHI SASVAVKQSS |
| 121 | VTQVTEQSPK VQSRYTKESA SSILASFGLS NEDLEELSRY PDEQLTPENM PLILRDIRMR |
| 181 | KMGRRLPNLP SQSRNKETLG SEAVSSNVID YGHASKYGYT EDPLEVRIYD PEIPTDEVEN |
| 241 | EFQSQQNISA SVPNPNVICN SMFPVEDVFR QMDFPGESSN NRSFFSVESG TKMSGLHISG |
| 301 | GQSVLEPIKS VNQSINQTVS QTMSQSLIPP SMNQQPFSSE LISSVSQQER IPHEPVINSS |
| 361 | NVHVGSRGSK KNYQSQADIP IRSPFGIVKA SWLPKFSHAD AQKMKRLPTP SMMNDYYAAS |
| 421 | PRIFPHLCSL CNVECSHLKD WIQHQNTSTH IESCRQLRQQ YPDWNPEILP SRRNEGNRKE |
| 481 | NETPRRRSHS PSPRRSRRSS SSHRFRRSRS PMHYMYRPRS RSPRICHRFI SRYRSRSRSR |
| 541 | SPYRIRNPFR GSPKCFRSVS PERMSRRSVR SSDRKKALED VVQRSGHGTE FNKQKHLEAA |
| 601 | DKGHSPAQKP KTSSGTKPSV KPTSATKSDS NLGGHSIRCK SKNLEDDTLS ECKQVSDKAV |
| 661 | SLQRKLRKEQ SLHYGSVLLI TELPEDGCTE EDVRKLFQPF GKVNDVLIVP YRKEAYLEME |
| 721 | FKEAITAIMK YIETTPLTIK GKSVKICVPG KKKAQNKEVK KKTLESKKVS ASTLKRDADA |
| 781 | SKAVEIVTST SAAKTGQAKA SVAKVNKSTG KSASSVKSVV TVAVKGNKAS IKTAKSGGKK |
| 841 | SLEAKKTGNV KNKDSNKPVT IPENSEIKTS IEVKATENCA KEAISDAALE ATENEPLNKE |
| 901 | TEEMCVMLVS NLPNKGYSVE EVYDLAKPFG GLKDILILSS HKKAYIEINR KAAESMVKFY |
| 961 | TCFPVLMDGN QLSISMAPEN MNIKDEEAIF ITLVKENDPE ANIDTIYDRF VHLDNLPEDG |
| 1021 | LQCVLCVGLQ FGKVDHHVFI SNRNKAILQL DSPESAQSMY SFLKQNPQNI GDHMLTCSLS |
| 1081 | PKIDLPEVQI EHDPELEKES PGLKNSPIDE SEVQTATDSP SVKPNELEEE STPSIQTETL |
| 1141 | VQQEEPCEEE AEKATCDSDF AVETLELETQ GEEVKEEIPL VASASVSIEQ FTENAEECAL |
| 1201 | NQQMFNSDLE KKGAEIINPK TALLPSDSVF AEERNLKGIL EESPSEAEDF ISGITQTMVE |
| 1261 | AVAEVEKNET VSEILPSTCI VTLVPGIPTG DEKTVDKKNI SEKKGNMDEK EEKEFNTKET |
| 1321 | RMDLQIGTEK AEKNEGRMDA EKVEKMAAMK EKPAENTLFK AYPNKGVGQA NKPDETSKTS |
| 1381 | ILAVSDVSSS KPSIKAVIVS SPKAKATVSK TENQKSFPKS VPRDQINAEK KLSAKEFGLL |
| 1441 | KPTSARSGLA ESSSKFKPTQ SSLTRGGSGR ISALQGKLSK LDYRDITKQS QETEARPSIM |
| 1501 | KRDDSNNKTL AEQNTKNPKS TTGRSSKSKE EPLFPFNLDE FVTVDEVIEE VNPSQAKQNP |
| 1561 | LKGKRKETLK NVPFSELNLK KKKGKTSTPR GVEGELSFVT LDEIGEEEDA AAHLAQALVT |
| 1621 | VDEVIDEEEL NMEEMVKNSN SLFTLDELID QDDCISHSEP KDVTVLSVAE EQDLLKQERL |
| 1681 | VTVDEIGEVE ELPLNESADI TFATLNTKGN EGDTVRDSIG FISSQVPEDP STLVTVDEIQ |
| 1741 | DDSSDLHLVT LDEVTEEDED SLADFNNLKE ELNFVTVDEV GEEEDGDNDL KVELAQSKND |
| 1801 | HPTDKKGNRK KRAVDTKKTK LESLSQVGPV NENVMEEDLK TMIERHLTAK TPTKRVRIGK |
| 1861 | TLPSEKAVVT EPAKGEEAFQ MSEVDEESGL KDSEPERKRK KTEDSSSGKS VASDVPEELD |
| 1921 | FLVPKAGFFC PICSLFYSGE KAMTNHCKST RHKQNTEKFM AKQRKEKEQN EAEERSSR. |

[0075] In some embodiments of the compositions of the disclosure, the composition further comprises (a) a sequence comprising a gRNA that specifically binds within an RNA molecule and (b) a sequence encoding a nuclease. In some embodiments, the sequence encoding a nuclease comprises a sequence isolated or derived from a CRISPR/Cas protein. In some embodiments, the CRISPR/Cas protein is isolated or derived from any one of a type I, a type IA, a type IB, a type IC, a type ID, a type IE, a type IF, a type IU, a type III, a type IIIA, a type IIIB, a type IIIC, a type IIID, a type IV, a type IVA, a type IVB, a type II, a type IIA, a type IIB, a type IIC, a type V, or a type VI CRISPR/Cas protein In some embodiments, the sequence encoding a nuclease comprises a sequence isolated or derived from a TALEN or a nuclease domain thereof. In some embodiments, the sequence encoding a nuclease comprises a sequence isolated or derived from a zinc finger nuclease or a nuclease domain thereof. In some embodiments, the target sequence comprises a sequence encoding a component of an adaptive immune response.

[0076] The disclosure provides a vector comprising a composition of the disclosure. In some embodiments, the vector is a viral vector. In some embodiments, the vector comprises a sequence isolated or derived from a lentivirus, an adenovirus, an adeno-associated virus (AAV) vector, or a retrovirus. In some embodiments, the vector is replication incompetent.

[0077] The disclosure provides a vector comprising a composition of the disclosure. In some embodiments, the vector is a viral vector. In some embodiments, the vector comprises a sequence isolated or derived from an adeno-associated vector (AAV). In some embodiments, the adeno-associated virus (AAV) is an isolated AAV. In some embodiments, the adeno-associated virus (AAV) is a self-complementary adeno-associated virus (scAAV). In some embodiments, the adeno-associated virus (AAV) is a recombinant adeno-associated virus (rAAV). In some embodiments, the adeno-associated virus (AAV) comprises a sequence isolated or derived from an AAV of serotype AAV1, AAV2, AAV3, AAV4, AAV5, AAV6, AAV7, AAV8, AAV9, AAV10, AAV11, or AAV12. In some embodiments, the adeno-associated virus (AAV) comprises a sequence isolated or derived from an AAV of serotype AAV9. In some embodiments, the adeno-associated virus (AAV) comprise a sequence isolated or derived from Anc80.

[0078] The disclosure provides a vector comprising a composition of the disclosure. In some embodiments, the vector is a viral vector. In some embodiments, the vector is a retrovirus.

[0079] The disclosure provides a vector comprising a composition of the disclosure. In some embodiments, the vector is a viral vector. In some embodiments, the vector is a lentivirus.

[0080] The disclosure provides a vector comprising a composition of the disclosure. In some embodiments, the vector is a non-viral vector. In some embodiments, the non-viral vector comprises a nanoparticle, a micelle, a liposome or lipoplex, a polymersome, a polyplex or a dendrimer.

[0081] The disclosure provides a composition comprising a vector of the disclosure.

[0082] The disclosure provides a cell comprising a vector of the disclosure.

[0083] The disclosure provides a cell comprising a cell of the disclosure.

[0084] In some embodiments of cells of the disclosure, the cell is a mammalian cell. In some embodiments, the cell is a human cell.

[0085] In some embodiments of cells of the disclosure, the cell is an immune cell. In some embodiments, the immune cell is a T lymphocyte (T-cell). In some embodiments, the T-cell is an effector T-cell, a helper T-cell, a memory T-cell, a regulatory T-cell, a natural Killer T-cell, a mucosal-associated invariant T-cell, or a gamma delta T cell.

[0086] In some embodiments of cells of the disclosure, the cell is an immune cell. In some embodiments, the immune cell is an antigen-presenting cell. In some embodiments, the antigen-presenting cell is a dendritic cell, a macrophage, or a B cell. In some embodiments, the antigen-presenting cell is a somatic cell.

[0087] In some embodiments of cells of the disclosure, the cell is an immune cell. In some embodiments, the cell is a healthy cell. In some embodiments, the cell is not a healthy cell. In some embodiments, the cell is isolated or derived from a subject having a disease or disorder.

[0088] The disclosure provides a composition comprising a cell of the disclosure.

[0089] The disclosure provides a composition comprising a plurality of cells of the disclosure.

[0090] The disclosure provides a method of masking a cell from an adaptive immune response comprising contacting a composition of the disclosure to the cell to produce a modified cell, wherein the composition modifies a level of expression of an RNA molecule of the modified cell and wherein the RNA molecule encodes a component of an adaptive immune response. In some embodiments, the cell is in vivo, in vitro, ex vivo or in situ. In some embodiments, the cell is in vitro or ex vivo. In some embodiments, a plurality of cells comprises the cell. In some embodiments, each cell of the plurality of cells contacts the composition, thereby producing a plurality of modified cells. In some embodiments, the method further comprises administering the modified cell to a subject. In some embodiments, the method further comprises administering the plurality of modified cells to a subject. In some embodiments, the cell is autologous. In some embodiments, the cell is allogeneic. In some embodiments, the plurality of modified cells is autologous. In some embodiments, the plurality of modified cells is allogeneic. In some embodiments, the component of an adaptive immune response comprises or consists of a component of a type I major histocompatibility complex (MHC I), a type II major histocompatibility complex (MEW II), a T-cell receptor (TCR), a costimulatory molecule or a combination thereof. In some embodiments, the MHC I component comprises an α1 chain, an α2 chain, an α3 chain, or a β2M protein. In some embodiments, the component of an adaptive immune response comprises or consists of an MHC I β2M protein. In some embodiments, the MEW II component comprises an α1 chain, an α2 chain, a β1 chain, or a β2 chain. In some embodiments, the TCR component comprises an α-chain and a β-chain. In some embodiments, the costimulatory molecule comprises a Cluster of Differentiation 28 (CD28), a Cluster of Differentiation 80 (CD80), a Cluster of Differentiation 86 (CD86), an Inducible T-cell COStimulator (ICOS), or an ICOS Ligand (ICOSLG) protein. In some embodiments, a protein component of an adaptive immune response is, without limitation, Beta-2-microglobulin (β2M), Human Leukocyte Antigen A (HLA-A), Human Leukocyte Antigen B (HLA-B), Human Leukocyte Antigen C (HLA-C), Cluster of Differentiation 28 (CD28), Cluster of Differentiation 80 (CD80), Cluster of Differentiation 86 (CD86), Inducible T-cell Costimulator (ICOS), ICOS Ligand (ICOSLG), OX40L, Interleukin 12 (IL12), or CC Chemokine Receptor 7 (CCR7).

[0091] The disclosure provides a method of preventing or reducing an adaptive immune response in a subject comprising administering a therapeutically effective amount of a composition of the disclosure to the subject, wherein the composition contacts at least one cell in the subject producing a modified cell, wherein the composition modifies a level of expression of an RNA molecule of the modified cell and wherein the RNA molecule encodes a component of an adaptive immune response.

[0092] The disclosure provides a method of treating a disease or disorder in a subject comprising administering a therapeutically effective amount of a composition of the disclosure to the subject, wherein the composition contacts at least one cell in the subject producing a modified cell, wherein the composition modifies a level of expression of an RNA molecule of the modified cell and wherein the composition prevents or reduces an adaptive immune response to the modified cell.

[0093] In some embodiments of the methods of the disclosure, the component of an adaptive immune response comprises or consists of a component of a type I major histocompatibility complex (MHC I), a type II major histocompatibility complex (MHC II), a T-cell receptor (TCR), a costimulatory molecule or a combination thereof. In some embodiments, the MHC I component comprises an α1 chain, an α2 chain, an α3 chain, or a β2M protein. In some embodiments, the component of an adaptive immune response comprises or consists of an MHC I β2M protein. In some embodiments, the MHC II component comprises an al chain, an α2 chain, a β1 chain, or a β2 chain. In some embodiments, the TCR component comprises an α-chain and a β-chain. In some embodiments, the costimulatory molecule comprises a Cluster of Differentiation 28 (CD28), a Cluster of Differentiation 80 (CD80), a Cluster of Differentiation 86 (CD86), an Inducible T-cell COStimulator (ICOS), or an ICOS Ligand (ICOSLG) protein.

[0094] In some embodiments of the methods of treating a disease or disorder of the disclosure, the disease or disorder is a genetic disease or disorder. In some embodiments, the disease or disorder is a single gene genetic disease or disorder. In some embodiments, the disease or disorder results from microsatellite instability. In some embodiments, the microsatellite instability occurs in a DNA sequence at least 1, 2, 3, 4, 5 or 6 repeated motifs. In some embodiments, an RNA molecule comprises a transcript of the DNA sequence and wherein the composition binds to a target sequence of the RNA molecule comprising at least 1, 2, 3, 4, 5, or 6 repeated motifs.

[0095] In some embodiments of the methods of the disclosure, the composition is administered systemically. In some embodiments, the composition is administered intravenously. In some embodiments, the composition is administered by an injection or an infusion.

[0096] In some embodiments of the methods of the disclosure, the composition is administered locally. In some embodiments, the composition is administered by an intraosseous, intraocular, intracerebral, or intraspinal route. In some embodiments, the composition is administered by an injection or an infusion.

[0097] In some embodiments of the methods of the disclosure, a therapeutically effective amount of the composition is a single dose.

[0098] In some embodiments of the methods of the disclosure, the composition is non-genome integrating.

### BRIEF DESCRIPTION OF THE DRAWINGS

[0099] The patent or application file contains at least one drawing executed in color. Copies of this patent or patent application publication with color drawing(s) will be provided by the Office upon request and payment of the necessary fee.

[0100] FIG. 1A is a schematic diagram depicting an exemplary RNA Endonuclease-C. jejuni Cas9 fusion protein.

[0101] FIG. 1B is a graph depicting changes in expression levels of Zika NS5 in the presence of both E43 and E67 CjeCas9-endonuclease fusions with sgRNAs containing the various NS5-targeting spacer sequences as indicated in Table 8. Zika NS5 expression is displayed as fold change relative to the endonuclease loaded with an sgRNA containing a control (Lambda) spacer sequence.

[0102] FIG. 2A is a fluorescence microscopy image of cells transfected with CjeCas9-endonuclease fusions loaded with an sgRNA containing a Zika NS5-targeting spacer sequence.

[0103] FIG. 2B is a graph depicting changes of expression of Zika NS5 in the presence of CjeCas9-endonuclease fusions loaded with the appropriate Zika NS5-targeting sgRNA as compared to CjeCas9-endonuclease fusions loaded with a non-Zika NS5 targeting sgRNA.

[0104] FIG. 3 is a list of exemplary endonucleases for use in the compositions of the disclosure.

[0105] FIG. 4 is a schematic diagram depicting a construct encoding an exemplary RNA Endonuclease-C. jejuni Cas9 fusion protein and two gRNA molecules for modulating immune response in the context of a gene therapy. The present invention describes a means to address human disease using a CRISPR-based gene therapy or other non-self protein encoded in AAV while simultaneously altering host gene expression to prevent adaptive immune response to the non-self protein. In one embodiment, the AAV particle (left) carries a pair of guide RNAs and a CRISPR-associated (Cas) protein. The guides target a gene associated with adaptive immune response and a gene (or gene product) to promote therapeutic benefit, respectively. Upon delivery to target tissue, the immune response-targeted guide reduces expression of genes associated with antigen presentation (beta-2-microglobulin, B2M) or co-stimulation of T cells (ICOSLG, CD80, CD86, OX40L, IL12, CCR7). Antigen presentation inhibition prevents formation of T helper (Th) cells specific to the therapeutic transgenes such as Cas proteins while co-stimulation inhibition prevents the activation of Th cells that are specific to the transgene.

### DETAILED DESCRIPTION

[0106] The disclosure provides compositions and methods for the simultaneous treatment of disease by targeting RNA molecules of a modified cell while masking the modified cell from an adaptive immune response. By inhibiting or reducing expression of a component of an adaptive immune response in the modified cell, the modified cell is invisible to a host immune system. For example, compositions of the disclosure may simultaneously target an RNA molecule associated with a genetic disease or disorder and an RNA molecule that encodes the β2M subunit of the MHC I. By selectively targeting an RNA molecule that encodes the β2M subunit of the MHC I, the composition prevents the modified cell from displaying one or more antigen peptides derived from an RNA targeting construct, vector, or combination thereof on the surface of the modified cell. Consequently, a subject's immune system does not identify the modified cell as containing foreign sequences and does not attempt to mount an immune response directed at the modified cell. This method increases the therapeutic efficacy of the treatment of the genetic disease or disorder while avoiding a common side effect of gene therapy.

### RNA-Targeting Fusion Protein Compositions

[0107] The disclosure provides a composition comprising (a) a sequence comprising a guide RNA (gRNA) that specifically binds a target sequence within an RNA molecule and (b) a sequence encoding a fusion protein, the sequence comprising a sequence encoding a first RNA-binding polypeptide and a sequence encoding a second RNA-binding polypeptide, wherein neither the first RNA-binding polypeptide nor the second RNA-binding polypeptide comprises a significant DNA-nuclease activity, wherein the first RNA-binding polypeptide and the second RNA-binding polypeptide are not identical, and wherein the second RNA-binding polypeptide comprises an RNA-nuclease activity wherein the first RNA-binding polypeptide and the second RNA-binding polypeptide are not identical, and wherein the second RNA-binding polypeptide comprises an RNA-nuclease activity.

[0108] In some embodiments of the compositions of the disclosure, the target sequence comprises at least one repeated sequence.

[0109] In some embodiments of the compositions of the disclosure, the gRNA sequence comprises a promoter capable of expressing the gRNA in a eukaryotic cell.

[0110] In some embodiments of the compositions of the disclosure, the eukaryotic cell is an animal cell. In some embodiments, the animal cell is a mammalian cell. In some embodiments, the animal cell is a human cell.

[0111] In some embodiments of the compositions of the disclosure, the promoter is a constitutively active promoter. In some embodiments, the promoter sequence is isolated or derived from a promoter capable of driving expression of an RNA polymerase. In some embodiments, the promoter sequence is isolated or derived from a U6 promoter. In some embodiments, the promoter sequence is isolated or derived from a promoter capable of driving expression of a transfer RNA (tRNA). In some embodiments, the promoter sequence is isolated or derived from an alanine tRNA promoter, an arginine tRNA promoter, an asparagine tRNA promoter, an aspartic acid tRNA promoter, a cysteine tRNA promoter, a glutamine tRNA promoter, a glutamic acid tRNA promoter, a glycine tRNA promoter, a histidine tRNA promoter, an isoleucine tRNA promoter, a leucine tRNA promoter, a lysine tRNA promoter, a methionine tRNA promoter, a phenylalanine tRNA promoter, a proline tRNA promoter, a serine tRNA promoter, a threonine tRNA promoter, a tryptophan tRNA promoter, a tyrosine tRNA promoter, or a valine tRNA promoter. In some embodiments, the promoter sequence is isolated or derived from a valine tRNA promoter.

[0112] In some embodiments of the compositions of the disclosure, the sequence comprising the gRNA further comprises a spacer sequence that specifically binds to the target RNA sequence. In some embodiments, the spacer sequence has at least 50%, 55%, 60%, 65%, 70%, 75%, 80%, 87%, 90%, 95%, 97%, 99% or any percentage in between of complementarity to the target RNA sequence. In some embodiments, the spacer sequence has 100% complementarity to the target RNA sequence. In some embodiments, the spacer sequence comprises or consists of 20 nucleotides. In some embodiments, the spacer sequence comprises or consists of 21 nucleotides. In some embodiments, the spacer sequence comprises or consists of the sequence

(SEQ ID NO: 1)

UGGAGCGAGCAUCCCCCAAA,

(SEQ ID NO: 2)

GUUUGGGGGAUGCUCGCUCCA,

(SEQ ID NO: 3)

CCCUCACUGCUGGGGAGUCC,

(SEQ ID NO: 4)

GGACUCCCCAGCAGUGAGGG,

(SEQ ID NO: 5)

GCAACUGGAUCAAUUUGCUG,

(SEQ ID NO: 6)

GCAGCAAAUUGAUCCAGUUGC,

(SEQ ID NO: 7)

GCAUUCUUAUCUGGUCAGUGC,

(SEQ ID NO: 8)

GCACUGACCAGAUAAGAAUG,

(SEQ ID NO: 9)

GAGCAGCAGCAGCAGCAGCAG,

(SEQ ID NO: 10)

GCAGGCAGGCAGGCAGGCAGG,

(SEQ ID NO: 11)

GCCCCGGCCCCGGCCCCGGC,
or

(SEQ ID NO: 84)

GCTGCTGCTGCTGCTGCTGC,

(SEQ ID NO: 74)

GGGGCCGGGGCCGGGGCCGG,

(SEQ ID NO: 75)

GGGCCGGGGCCGGGGCCGGG,

(SEQ ID NO: 76)

GGCCGGGGCCGGGGCCGGGG,

(SEQ ID NO: 77)

GCCGGGGCCGGGGCCGGGGC,

(SEQ ID NO: 78)

CCGGGGCCGGGGCCGGGGCC,
or

(SEQ ID NO: 79)

CGGGGCCGGGGCCGGGGCCG.

[0113] In some embodiments of the compositions of the disclosure, the sequence comprising the gRNA further comprises a spacer sequence that specifically binds to the target RNA sequence. In some embodiments, the spacer sequence has at least 50%, 55%, 60%, 65%, 70%, 75%, 80%, 87%, 90%, 95%, 97%, 99% or any percentage in between of complementarity to the target RNA sequence. In some embodiments, the spacer sequence has 100% complementarity to the target RNA sequence. In some embodiments, the spacer sequence comprises or consists of 20 nucleotides. In some embodiments, the spacer sequence comprises or consists of 21 nucleotides. In some embodiments, the spacer sequence comprises or consists of the sequence

(SEQ ID NO: 14)

GUGAUAAGUGGAAUGCCAUG,

(SEQ ID NO: 15)

CUGGUGAACUUCCGAUAGUG,
or

(SEQ ID NO: 16)

GAGATATAGCCTGGTGGTTC.

[0114] In some embodiments of the compositions of the disclosure, the sequence comprising the gRNA further comprises a spacer sequence that specifically binds to the target RNA sequence. In some embodiments, the spacer sequence has at least 50%, 55%, 60%, 65%, 70%, 75%, 80%, 87%, 90%, 95%, 97%, 99% or any percentage in between of complementarity to the target RNA sequence. In some embodiments, the spacer sequence has 100% complementarity to the target RNA sequence. In some embodiments, the spacer sequence comprises or consists of 20 nucleotides. In some embodiments, the spacer sequence comprises or consists of 21 nucleotides. In some embodiments, the spacer sequence comprises or consists of a sequence comprising at least 1, 2, 3, 4, 5, 6, or 7 repeats of the sequence CUG (SEQ ID NO: 18), CCUG (SEQ ID NO: 19), CAG (SEQ ID NO: 80), GGGGCC (SEQ ID NO: 81) or any combination thereof.

[0115] In some embodiments of the compositions of the disclosure, the sequence comprising the gRNA further comprises a scaffold sequence that specifically binds to the first RNA binding protein. In some embodiments, the scaffold sequence comprises a stem-loop structure. In some embodiments, the scaffold sequence comprises or consists of 90 nucleotides. In some embodiments, the scaffold sequence comprises or consists of 93 nucleotides. In some embodiments, the scaffold sequence comprises or consists of the sequence GUUUAAGAGCUAUGCUGGAAACAGCAUAGCAAGUUUAAAUAAGGCUAGUCCGUU AUCAACUUGAAAAAGUGGCACCGAGUCGGUGC U (SEQ ID NO: 83). In some embodiments, the scaffold sequence comprises or consists of the sequence GGACAGCAUAGCAAGUUAAAAUAAGGCUAGUCCGUUAUCAACUUGAAAAAGUGG CACCGAGUCGGUGCUUUUU (SEQ ID NO: 17). In some embodiments, the scaffold sequence comprises or consists of the sequence

(SEQ ID NO: 82)

GUUUAAGAGCUAUGCUGGAAACAGCAUAGCAAGUUUAAAUAAGGCUAGUC
CGUUAUCAACUUGAAAAAGUGGCACCGAGUCGGUGCUUUUUUU
or

(SEQ ID NO: 13)

GUUUUAGAGCUAGAAAUAGCAAGUUAAAAUAAGGCUAGUCCGUUAUCAAC
UUGAAAAAGUGGCACCGAGUCGGUGCUUUUUUU.

[0116] In some embodiments of the compositions of the disclosure, the gRNA does not bind or does not selectively bind to a second sequence within the RNA molecule.

[0117] In some embodiments of the compositions of the disclosure, an RNA genome or an RNA transcriptome comprises the RNA molecule.

[0118] In some embodiments of the compositions of the disclosure, the first RNA binding protein comprises a CRISPR-Cas protein. In some embodiments, the CRISPR-Cas protein is a Type II CRISPR-Cas protein. In some embodiments, the first RNA binding protein comprises a Cas9 polypeptide or an RNA-binding portion thereof. In some embodiments, the CRISPR-Cas protein comprises a native RNA nuclease activity. In some embodiments, the native RNA nuclease activity is reduced or inhibited. In some embodiments, the native RNA nuclease activity is increased or induced. In some embodiments, the CRISPR-Cas protein comprises a native DNA nuclease activity and the native DNA nuclease activity is inhibited. In some embodiments, the CRISPR-Cas protein comprises a mutation. In some embodiments, a nuclease domain of the CRISPR-Cas protein comprises the mutation. In some embodiments, the mutation occurs in a nucleic acid encoding the CRISPR-Cas protein. In some embodiments, the mutation occurs in an amino acid encoding the CRISPR-Cas protein. In some embodiments, the mutation comprises a substitution, an insertion, a deletion, a frameshift, an inversion, or a transposition. In some embodiments, the mutation comprises a deletion of a nuclease domain, a binding site within the nuclease domain, an active site within the nuclease domain, or at least one essential amino acid residue within the nuclease domain.

[0119] In some embodiments of the compositions of the disclosure, the first RNA binding protein comprises a CRISPR-Cas protein. In some embodiments, the CRISPR-Cas protein is a Type V CRISPR-Cas protein. In some embodiments, the first RNA binding protein comprises a Cpf1 polypeptide or an RNA-binding portion thereof. In some embodiments, the CRISPR-Cas protein comprises a native RNA nuclease activity. In some embodiments, the native RNA nuclease activity is reduced or inhibited. In some embodiments, the native RNA nuclease activity is increased or induced. In some embodiments, the CRISPR-Cas protein comprises a native DNA nuclease activity and the native DNA nuclease activity is inhibited. In some embodiments, the CRISPR-Cas protein comprises a mutation. In some embodiments, a nuclease domain of the CRISPR-Cas protein comprises the mutation. In some embodiments, the mutation occurs in a nucleic acid encoding the CRISPR-Cas protein. In some embodiments, the mutation occurs in an amino acid encoding the CRISPR-Cas protein. In some embodiments, the mutation comprises a substitution, an insertion, a deletion, a frameshift, an inversion, or a transposition. In some embodiments, the mutation comprises a deletion of a nuclease domain, a binding site within the nuclease domain, an active site within the nuclease domain, or at least one essential amino acid residue within the nuclease domain.

[0120] In some embodiments of the compositions of the disclosure, the first RNA binding protein comprises a CRISPR-Cas protein. In some embodiments, the CRISPR-Cas protein is a Type VI CRISPR-Cas protein. In some embodiments, the first RNA binding protein comprises a Cas13 polypeptide or an RNA-binding portion thereof. In some embodiments, the first RNA binding protein comprises a Cas13d polypeptide or an RNA-binding portion thereof. In some embodiments, the CRISPR-Cas protein comprises a native RNA nuclease activity. In some embodiments, the native RNA nuclease activity is reduced or inhibited. In some embodiments, the native RNA nuclease activity is increased or induced. In some embodiments, the CRISPR-Cas protein comprises a native DNA nuclease activity and the native DNA nuclease activity is inhibited. In some embodiments, the CRISPR-Cas protein comprises a mutation. In some embodiments, a nuclease domain of the CRISPR-Cas protein comprises the mutation. In some embodiments, the mutation occurs in a nucleic acid encoding the CRISPR-Cas protein. In some embodiments, the mutation occurs in an amino acid encoding the CRISPR-Cas protein. In some embodiments, the mutation comprises a substitution, an insertion, a deletion, a frameshift, an inversion, or a transposition. In some embodiments, the mutation comprises a deletion of a nuclease domain, a binding site within the nuclease domain, an active site within the nuclease domain, or at least one essential amino acid residue within the nuclease domain.

[0121] In some embodiments of the compositions of the disclosure, the first RNA binding protein comprises a Pumilio and FBF (PUF) protein. In some embodiments, the first RNA binding protein comprises a Pumilio-based assembly (PUMBY) protein. In some embodiments, a PUF1 protein of the disclosure comprises or consists of the amino acid sequence of

| (SEQ ID NO: 208) | |
|---|---|
| MDKSKQMNIN NLSNIPEVID PGITIPIYEE EYENNGESNS QLQQQPQKLG SYRSRAGKFS | 60 |
| NTLSNLLPSI SAKLHHSKKN SHGKNGAEFS SSNNSSQSTV ASKTPRASPS RSKMMESSID | 120 |
| GVTMDRPGSL TPPQDMEKLV HFPDSSNNFL IPAPRGSSDS FNLPHQISRT RNNTMSSQIT | 180 |
| SISSIAPKPR TSSGIWSSNA SANDPMQQHL LQQLQPTTSN NTTNSNTLND YSTKTAYFDN | 240 |
| MVSTSGSQMA DNKMNTNNLA IPNSVWSNTR QRSQSNASSI YTDAPLYEQP ARASISSHYT | 300 |
| IPTQESPLIA DEIDPQSINW VTMDPTVPSI NQISNLLPTN TISISNVFPL QHQQPQLNNA | 360 |
| INLTSTSLAT LCSKYGEVIS ARTLRNLNMA LVEFSSVESA VKALDSLQGK EVSMIGAPSK | 420 |
| ISFAKILPMH QQPPQFLLNS QGLPLGLENN NLQPQPLLQE QLFNGAVTFQ QQGNVSIPVF | 480 |
| NQQSQQSQHQ NHSSGSAGFS NVLHGYNNNN SMHGNNNNSA NEKEQCPFPL PPPNVNEKED | 540 |
| LLREIIELFE ANSDEYQINS LIKKSLNHKG TSDTQNFGPL PEPLSGREFD PPKLRELRKS | 600 |
| IDSNAFSDLE IEQLAIAMLD ELPELSSDYL GNTIVQKLFE HSSDIIKDIM LRKTSKYLTS | 660 |
| MGVHKNGTWA CQKMITMAHT PRQIMQVTQG VKDYCTPLIN DQFGNYVIQC VLKFGFPWNQ | 720 |
| FIFESIIANF WVIVQNRYGA RAVRACLEAH DIVTPEQSIV LSAMIVTYAE YLSTNSNGAL | 780 |
| LVTWFLDTSV LPNRHSILAP RLTKRIVELC GHRLASLTIL KVLNYRGDDN ARKIILDSLF | 840 |
| GNVNAHDSSP PKELTKLLCE TNYGPTFVHK VLAMPLLEDD LRAHIIKQVR KVLTDSTQIQ | 900 |
| PSRRLLEEVG LASPSSTHNK TKQQQQQHHN SSISHMFATP DTSGQHMRGL SVSSVKSGGS | 960 |
| KHTTMNTTTT NGSSASTLSP GQPLNANSNS SMGYFSYPGV FPVSGFSGNA SNGYAMNNDD | 1020 |
| LSSQFDMLNF NNGTRLSLPQ LSLTNHNNTT MELVNNVGSS QPHTNNNNNN NNTNYNDDNT | 1080 |
| VFETLTLHSA N. | 1091 |

[0122] In some embodiments, a PUF3 protein of the disclosure comprises or consists of the amino acid sequence of

| (SEQ ID NO: 209) | |
|---|---|
| 1 | MEMNMDMDMD MELASIVSSL SALSHSNNNG GQAAAAGIVN GGAAGSQQIG GFRRSSFTTA |
| 61 | NEVDSEILLL HGSSESSPIF KKTALSVGTA PPFSTNSKKF FGNGGNYYQY RSTDTASLSS |
| 121 | ASYNNYHTHH TAANLGKNNK VNHLLGQYSA SIAGPVYYNG NDNNNSGGEG FFEKFGKSLI |
| 181 | DGTRELESQD RPDAVNTQSQ FISKSVSNAS LDTQNTFEQN VESDKNFNKL NRNTTNSGSL |
| 241 | YHSSSNSGSS ASLESENAHY PKRNIWNVAN TPVFRPSNNP AAVGATNVAL PNQQDGPANN |
| 301 | NFPPYMNGFP PNQFHQGPHY QNFPNYLIGS PSNFISQMIS VQIPANEDTE DSNGKKKKKA |
| 361 | NRPSSVSSPS SPPNNSPFPF AYPNPMMFMP PPPLSAPQQQ QQQQQQQQQE DQQQQQQQEN |
| 421 | PYIYYPTPNP IPVKMPKDEK TFKKRNNKNH PANNSNNANK QANPYLENSI PTKNTSKKNA |
| 481 | SSKSNESTAN NHKSHSHSHP HSQSLQQQQQ TYHRSPLLEQ LRNSSSDKNS NSNMSLKDIF |
| 541 | GHSLEFCKDQ HGSRFIQREL ATSPASEKEV IFNEIRDDAI ELSNDVFGNY VIQKFFEFGS |
| 601 | KIQKNTLVDQ FKGNMKQLSL QMYACRVIQK ALEYIDSNQR IELVLELSDS VLQMIKDQNG |
| 661 | NHVIQKAIET IPIEKLPFIL SSLTGHIYHL STHSYGCRVI QRLLEFGSSE DQESILNELK |
| 721 | DFIPYLIQDQ YGNYVIQYVL QQDQFTNKEM VDIKQEIIET VANNVVEYSK HKFASNVVEK |
| 781 | SILYGSKNQK DLIISKILPR DKNHALNLED DSPMILMIKD QFANYVIQKL VNVSEGEGKK |
| 841 | LIVIAIRAYL DKLNKSNSLG NRHLASVEKL AALVENAEV. |

In some embodiments, a PUF4 protein of the disclosure comprises or consists of the amino acid sequence of

| (SEQ ID NO: 210) | |
|---|---|
| 1 | MSTKGLKEEI DDVPSVDPVV SETVNSALFQ LQLDDPEENA TSNAFANKVS QDSQFANGPP |
| 61 | SQMFPHPQMM GGMGFMPYSQ MMQVPHNPCP FFPPPDFNDP TAPLSSSPLN AGGPPMLFKN |
| 121 | DSLPFQMLSS GAAVATQGGQ NLNPLINDNS MKVLPIASAD PLWTHSNVPG SASVAIEETT |
| 181 | ATLQESLPSK GRESNNKASS FRRQTFHALS PTDLINAANN VTLSKDFQSD MQNFSKAKKP |
| 241 | SVGANNTAKT RTQSISFDNT PSSTSFIPPT NSVSEKLSDF KIETSKEDLI NKTAPAKKES |
| 301 | PTTYGAAYPY GGPLLQPNPI MPGHPHNISS PIYGIRSPFP NSYEMGAQFQ PFSPILNPTS |
| 361 | HSLNANSPIP LTQSPIHLAP VLNPSSNSVA FSDMKNDGGK PTTDNDKAGP NVRMDLINPN |
| 421 | LGPSMQPFHI LPPQQNTPPP PWLYSTPPPF NAMVPPHLLA QNHMPLMNSA NNKHHGRNNN |
| 481 | SMSSHNDNDN IGNSNYNNKD TGRSNVGKMK NMKNSYHGYY NNNNNNNNNN NNNNNSNATN |
| 541 | SNSAEKQRKI EESSRFADAV LDQYIGSIHS LCKDQHGCRF LQKQLDILGS KAADAIFEET |
| 601 | KDYTVELMTD SFGNYLIQKL LEEVTTEQRI VLTKISSPHF VEISLNPHGT RALQKLIECI |
| 661 | KTDEEAQIVV DSLRPYTVQL SKDLNGNHVI QKCLQRLKPE NFQFIFDAIS DSCIDIATHR |
| 721 | HGCCVLQRCL DHGTTEQCDN LCDKLLALVD KLTLDPFGNY VVQYIITKEA EKNKYDYTHK |
| 781 | IVHLLKPRAI ELSIHKFGSN VIEKILKTAI VSEPMILEIL NNGGETGIQS LLNDSYGNYV |
| 841 | LQTALDISHK QNDYLYKRLS EIVAPLLVGP IRNTPHGKRI IGMLHLDS. |

In some embodiments, a PUF5 protein of the disclosure comprises or consists of the amino acid sequence of

| (SEQ ID NO: 211) | |
|---|---|
| 1 | MSDSTGRINS KASDSSSISD HQTADLSIFN GSFDGGAFSS SNIPLFNFMG TGNQRFQYSP |
| 61 | HPFAKSSDPC RLAALTPSTP KGPLNLTPAD FGLADFSVGN ESFADFTANN TSFVGNVQSN |
| 121 | VRSTRLLPAW AVDNSGNIRD DLTLQDVVSN GSLIDFAMDR TGVKFLERHF PEDHDNEMHF |
| 181 | VLFDKLTEQG AVFTSLCRSA AGNFIIQKFV EHATLDEQER LVRKMCDNGL IEMCLDKFAC |
| 241 | RVVQMSIQKF DVSIAMKLVE KISSLDFLPL CTDQCAIHVL QKVVKLLPIS AWSFFVKFLC |
| 301 | RDDNLMTVCQ DKYGCRLVQQ TIDKLSDNPK LHCFNTRLQL LHGLMTSVAR NCFRLSSNEF |
| 361 | ANYVVQYVIK SSGVMEMYRD TIIEKCLLRN ILSMSQDKYA SHVVEGAFLF APPLLLSEMM |
| 421 | DEIFDGYVKD QETNRDALDI LLFHQYGNYV VQQMISICIS ALLGKEERKM VASEMRLYAK |
| 481 | WFDRIKNRVN RHSGRLERFS SGKKIIESLQ KLNVPMTMTN EPMPYWAMPT PLMDISAHFM |
| 541 | NKLNFQKNSV FDE. |

In some embodiments, a PUF6 protein of the disclosure comprises or consists of the amino acid sequence of

| (SEQ ID NO: 212) | |
|---|---|
| 1 | MTPNRRSTDS YNMLGASFDF DPDFSLLSNK THKNKNPKPP VKLLPYRHGS NTTSSDLDNY |
| 61 | IFNSGSGSSD DETPPPAAPI FISLEEVLLN GLLIDFAIDP SGVKFLEANY PLDSEDQIRK |
| 121 | AVFEKLTEST TLFVGLCHSR NGNFIVQKLV ELATPAEQRE LLRQMIDGGL LVMCKDKFAC |
| 181 | RVVQLALQKF DHSNVFQLIQ ELSTFDLAAM CTDQISIHVI QRVVKQLPVD MWTFFVHFLS |
| 241 | SGDSLMAVCQ DKYGCRLVQQ VIDRLAENTK LPCFKFRIQL LHSLMTCIVR NCYRLSSNEF |
| 301 | ANYVIQYVIK SSGIMEMYRD TIIDKCLLRN LLSMSQDKYA SHVIEGAFLF APPALLHEMM |
| 361 | EEIFSGYVKD VELNRDALDI LLFHQYGNYV VQQMISICTA ALIGKEERQL PPAILLLYSG |
| 421 | WYEKMKQRVL QHASRLERFS SGKKIIDSVM RHGVPTAAAI NAQAAPSLME LTAQFDAMFP |
| 481 | SFLAR. |

In some embodiments, a PUF7 protein of the disclosure comprises or consists of the amino acid sequence of

| (SEQ ID NO: 213) | |
|---|---|
| 1 | MTPNRRSTDS YNMLGASFDF DPDFSLLSNK THKNKNPKPP VKLLPYRHGS NTTSSDSDSY |
| 61 | IFNSGSGSSD AETPAPVAPI FISLEDVLLN GQLIDFAIDP SGVKFLEANY PLDSEDQIRK |
| 121 | AVFEKFTEST TLFVGLCHSR NGNFIVQKLV ELATPAEQRE LLRQMIDGGL LAMCKDKFAC |
| 181 | RVVQLALQKF DHSNVFQLIQ ELSTFDLAAM CTDQISIHVI QRVVKQLPVD MWTFFVHFLS |
| 241 | SGDSLMAVCQ DKYGCRLVQQ VIDRLAENPK LPCFKFRIQL LHSLMTCIVR NCYRLSSNEF |
| 301 | ANYVIQYVIK SSGIMEMYRD TIIDKCLLRN LLSMSQDKYA SHVIEGAFLF APPALLHEMM |
| 361 | EEIFSGYVKD VESNRDALDI LLFHQYGNYV VQQMISICTA ALIGKEEREL PPAILLLYSG |
| 421 | WYEKMKQRVL QHASRLERFS SGKKIIDSVM RHGVPTAAAV NAQAAPSLME LTAQFDAMFP |
| 481 | SFLAR. |

In some embodiments, a PUF8 protein of the disclosure comprises or consists of the amino acid sequence of

| (SEQ ID NO: 214) | |
|---|---|
| 1 | MSRPISIGNT CTFDPSASPI ESLGRSIGAQ KIVDSVCGSP IRSYGRHIST NPKNERLPDT |
| 61 | PEFQFATYMH QGGKVIGQNT LHMFGTPPSC YCAQENIPIS SNVGHVLSTI NNNYMNHQYN |
| 121 | GSNMFSNQMT QMLQAQAYND LQMHQAHSQS IRVPVQPSAT GIFSNPYREP TTTDDLLTRY |
| 181 | RANPAMMKNL KLSDIRGALL KFAKDQVGSR FIQQELASSK DRFEKDSIFD EVVSNADELV |
| 241 | DDIFGNYVVQ KFFEYGEERH WARLVDAIID RVPEYAFQMY ACRVLQKALE KINEPLQIKI |
| 301 | LSQIRHVIHR CMKDQNGNHV VQKAIEKVSP QYVQFIVDTL LESSNTIYEM SVDPYGCRVV |
| 361 | QRCLEHCSPS QTKPVIGQIH KRFDEIANNQ YGNYVVQHVI EHGSEEDRMV IVTRVSNNLF |
| 421 | EFATHKYSSN VIEKCLEQGA VYHKSMIVGA ACHHQEGSVP IVVQMMKDQY ANYVVQKMFD |
| 481 | QVTSEQRREL ILTVRPHIPV LRQFPHGKHI LAKLEKYFQK PAVMSYPYQD MQGSH. |

[0123] In some embodiments, a PUF9 protein of the disclosure comprises or consists of the amino acid sequence of

| (SEQ ID NO: 215) | |
|---|---|
| 1 | MADPNWAYAP PTNYYADHSI AKPIMISGGH PSQDQGHSPK SESFGQSVTT AFNGMVDNLV |
| 61 | GSPSSSVQQR NYFTTTPFPI SRSPNDRNDD KIMGNGSYGV PIPIPQDGVP QGTPDFQMTP |
| 121 | FLQQGGHLIG GSPNGPVQVS GNWYSGGAGI FSTMQQADPS NGMPGMAAEF VNNENGMPGP |
| 181 | NGMHQQAMIS GSPPFPYQNM MNLTTSFGAM GLGPQQIQQR DPQMFQQPIL HEPIQGMAQN |
| 241 | GFGQQVFFTQ MQNQQHPQGQ AQQQLQQLAQ QHQQQQNSQQ FFGQGPNGMG NGGVMNDWSQ |
| 301 | RSFGMPQQQA QQNGLPPNFS QNPPRRRGPE DPNGQTPKTL QDIKNNVIEF AKDQHGSRFI |
| 361 | QQKLERASLR DKAAIFTPVL ENAEELMTDV FGNYVIQKFF EFGNNEQRNQ LVGTIRGNVM |
| 421 | KLALQMYGCR VIQKALEYVE EKYQHEILGE MEGQVLKCVK DQNGNHVIQK VIERVEPERL |
| 481 | QFIIDAFTKN NSDNVYTLSV HPYGCRVIQR VLEYCNEEQK QPVLDALQIH LKQLVLDQYG |
| 541 | NYVIQHVIEH GSPSDKEQIV QDVISDDLLK FAQHKFASNV IEKCLTFGGH AERNLIIDKV |
| 601 | CGDPNDPSPP LLQMMKDPFA NYVVQKMLDV ADPQHRKKIT LTIKPHIATL RKYNFGKHIL |
| 661 | LKLEKYFAKQ APANSSNSSS NDQIYEHSPF DIPLGADFSN HPF. |

[0124] In some embodiments of the compositions of the disclosure, the first RNA binding protein does not require multimerization for RNA-binding activity. In some embodiments, the first RNA binding protein is not a monomer of a multimer complex. In some embodiments, a multimer protein complex does not comprise the first RNA binding protein.

[0125] In some embodiments of the compositions of the disclosure, the first RNA binding protein selectively binds to a target sequence within the RNA molecule. In some embodiments, the first RNA binding protein does not comprise an affinity for a second sequence within the RNA molecule. In some embodiments, the first RNA binding protein does not comprise a high affinity for or selectively bind a second sequence within the RNA molecule.

[0126] In some embodiments of the compositions of the disclosure, an RNA genome or an RNA transcriptome comprises the RNA molecule.

[0127] In some embodiments of the compositions of the disclosure, the first RNA binding protein comprises between 2 and 1300 amino acids, inclusive of the endpoints.

[0128] In some embodiments of the compositions of the disclosure, the sequence encoding the first RNA binding protein further comprises a nuclear localization signal (NLS). In some embodiments, the sequence encoding a nuclear localization signal (NLS) is positioned 3′ to the sequence encoding the first RNA binding protein. In some embodiments, the first RNA binding protein comprises an NLS at a C-terminus of the protein.

[0129] In some embodiments of the compositions of the disclosure, the sequence encoding the first RNA binding protein further comprises a first sequence encoding a first NLS and a second sequence encoding a second NLS. In some embodiments, the sequence encoding the first NLS or the second NLS is positioned 3′ to the sequence encoding the first RNA binding protein. In some embodiments, the first RNA binding protein comprises the first NLS or the second NLS at a C-terminus of the protein.

[0130] In some embodiments of the compositions of the disclosure, the second RNA binding protein comprises or consists of a nuclease domain. In some embodiments, the second RNA binding protein binds RNA in a manner in which it associates with RNA. In some embodiments, the second RNA binding protein associates with RNA in a manner in which it cleaves RNA.

[0131] In some embodiments of the compositions of the disclosure, the sequence encoding the second RNA binding protein comprises or consists of an RNAse. In some embodiments, the second RNA binding protein comprises or consists of an RNAse1 polypeptide. In some embodiments, the RNAse1 polypeptide comprises or consists of: KESRAKKFQRQHMDSDSSPSSSSTYCNQMMRRRNMTQGLCKPVNTFVHEPLVDVQNV CFQEKVTCKNGQGNCYKSNSSMHITDCRLTNGSRYPNCAYRTSPKERHIIVACEGSPYV PVHFDASVEDST (SEQ ID NO: 20). In some embodiments, the second RNA binding protein comprises or consists of an RNAse4 polypeptide. In some embodiments, the RNAse4 polypeptide comprises or consists of: QDGMYQRFLRQHVHPEETGGSDRYCDLMMQRRKMTLYHCKRFNTFIHEDIWNIRSIC S TTNIQCKNGKMNCHEGVVKVTDCRDTGS SRAPNCRYRAIASTRRVVIACEGNPQVPVH FDG (SEQ ID NO: 21). In some embodiments, the second RNA binding protein comprises or consists of an RNAse6 polypeptide. In some embodiments, the RNAse6 polypeptide comprises or consists of: WPKRLTKAHWFEIQHIQPSPLQCNRAMSGINNYTQHCKHQNTFLHDSFQNVAAVCDLL SIVCKNRRHNCHQSSKPVNMTDCRLTSGKYPQCRYSAAAQYKFFIVACDPPQKSDPPYK LVPVHLDSIL (SEQ ID NO: 22). In some embodiments, the second RNA binding protein comprises or consists of an RNAse7 polypeptide. In some embodiments, the RNAse7 polypeptide comprises or consists of: APARAGFCPLLLLLLLGLWVAEIPVSAKPKGMTSSQWFKIQHMQPSPQACNSAMKNINK HTKRCKDLNTFLHEPFSSVAATCQTPKIACKNGDKNCHQSHGPVSLTMCKLTSGKYPNC RYKEKRQNKSYVVACKPPQKKDSQQFHLVPVHLDRVL (SEQ ID NO: 23). In some embodiments, the second RNA binding protein comprises or consists of an RNAse8 polypeptide. In some embodiments, the RNAse8 polypeptide comprises or consists of: TSSQWFKTQHVQPSPQACNSAMSIINKYTERCKDLNTFLHEPFSSVAITCQTPNIACKNSC KNCHQSHGPMSLTMGELTSGKYPNCRYKEKHLNTPYIVACDPPQQGDPGYPLVPVHLD KVV (SEQ ID NO: 24). In some embodiments, the second RNA binding protein comprises or consists of an RNAse2 polypeptide. In some embodiments, the RNAse2 polypeptide comprises or consists of: KPPQFTWAQWFETQHINMTSQQCTNAMQVINNYQRRCKNQNTFLLTTFANVVNVCGN PNMTCPSNKTRKNCHHSGSQVPLIHCNLTTPSPQNISNCRYAQTPANMFYIVACDNRDQ RRDPPQYPVVPVHLDRII (SEQ ID NO: 25). In some embodiments, the second RNA binding protein comprises or consists of an RNAse6PL polypeptide. In some embodiments, the RNAse6PL polypeptide comprises or consists of: DKRLRDNHEWKKLIMVQHWPETVCEKIQNDCRDPPDYWTIHGLWPDKSEGCNRSWPF NLEEIKKNWMEITDSSLPSPSMGPAPPRWMRSTPRRSTLAEAWNSTGSWTSTGGCALPP AALPSGDLCCRPSLTAGSRGVGVDLTALHQLLHVHYSATGIIPEECSEPTKPFQIILHHDH TEWVQSIGMPIWGTISSSESAIGKNEESQPACAVLSHDS (SEQ ID NO: 26). In some embodiments, the second RNA binding protein comprises or consists of an RNAseL polypeptide. In some embodiments, the RNAseL polypeptide comprises or consists of: AAVEDNHLLIKAVQNEDVDLVQQLLEGGANVNFQEEEGGWTPLHNAVQMSREDIVEL LLRHGADPVLRKKNGATPFILAAIAGSVKdLLKLFLSKGADVNECDFYGFTAFMEAAVY GKVKALKFLYKRGANVNLRRKTKEDQERLRKGGATALMDAAEKGHVEVLKILLDEM GADVNACDNMGRNALIHALLSSDDSDVEAITHLLLDHGADVNVRGERGKTPLILAVEK KHLGLVQRLLEQEHIEINDTDSDGKTALLLAVELKLKKIAELLCKRGASTDCGDLVMTA RRNYDHSLVKVLLSHGAKEDFHPPAEDWKPQSSHWGAALKDLHRIYRPMIGKLKFFID EKYKIADTSEGGIYLGEYEKQEVAVKTFCEGSPRAQREVSCLQSSRENSHLVTFYGSESH RGHLEVCVTLCEQTLEACLDVHRGEDVENEEDEFARNVLSSIFKAVQELHLSCGYTHQD LQPQNILIDSKKAAHLADFDKSIKWAGDPQEVKRDLEDLGRLVLYVVKKGSISFEDLKA QSNEEVVQLSPDEETKDLIHRLFHPGEHVRDCLSDLLGHPFFWTWESRYRTLRNVGNES DIKTRKSESEILRLLQPGPSEHSKSFDKWTTKINECVMKKMNKFYEKRGNFYQNTVGDL LKFIRNLGEHIDEEKHKKMKLKIGDPSLYFQKTFPDLVIYVYTKLQNTEYRKHFPQTHSP NKPQCDGAGGASGLASPGC (SEQ ID NO: 27). In some embodiments, the second RNA binding protein comprises or consists of an RNAseT2 polypeptide. In some embodiments, the RNAseT2 polypeptide comprises or consists of: VQHWPETVCEKIQNDCRDPPDYWTIHGLWPDKSEGCNRSWPFNLEEIKDLLPEMRAYW PDVIHSFPNRSRFWKHEWEKHGTCAAQVDALNSQKKYFGRSLELYRELDLNSVLLKLGI KPSINYYQVADFKDALARVYGVIPKIQCLPPSQDEEVQTIGQIELCLTKQDQQLQNCTEP GEQPSPKQEVWLANGAAESRGLRVCEDGPVFYPPPKKTKH (SEQ ID NO: 28). In some embodiments, the second RNA binding protein comprises or consists of an RNAse11 polypeptide. In some embodiments the RNAse11 polypeptide comprises or consists of: EASESTMKIIKEEFTDEEMQYDMAKSGQEKQTIEILMNPILLVKNTSLSMSKDDMSSTLL TFRSLHYNDPKGNSSGNDKECCNDMTVWRKVSEANGSCKWSNNFIRSSTEVMRRVHR APSCKFVQNPGISCCESLELENTVCQFTTGKQFPRCQYHSVTSLEKILTVLTGHSLMSWL VCGSKL (SEQ ID NO: 29). In some embodiments, the second RNA binding protein comprises or consists of an RNAseT2-like polypeptide. In some embodiments, the RNAseT2-like polypeptidec omprises or consists of:

(SEQ ID NO: 30)

XLGGADKRLRDNHEWKKLIMVQHWPETVCEKIQNDCRDPPDYWTIHGLWP
DKSEGCNRSWPFNLEEIKDLLPEMRAYWPDVIHSFPNRSRFWKHEWEKHG
TCAAQVDALNSQKKYFGRSLELYRELDLNSVLLKLGIKPSINYYQTTEED
LNLDVEPTTEDTAEEVTIHVLLHSALFGEIGPRRW.

[0132] In some embodiments of the compositions of the disclosure, the second RNA binding protein comprises or consists of a mutated RNAse. In some embodiments, the second RNA binding protein comprises or consists of a mutated Rnase1 (Rnase1(K41R)) polypeptide. In some embodiments, the Rnase1(K41R) polypeptide comprises or consists of: KESRAKKFQRQHMDSDSSPSSSSTYCNQMMRRRNMTQGRCRPVNTFVHEPLVDVQNV CFQEKVTCKNGQGNCYKSNSSMHITDCRLTNGSRYPNCAYRTSPKERHIIVACEGSPYV PVHFDASVEDST (SEQ ID NO: 116). In some embodiments, the second RNA binding protein comprises or consists of a mutated Rnase1 (Rnase1(K41R, D121E)) polypeptide. In some embodiments, the Rnase1 (Rnase1(K41R, D121E)) comprises or consists of: KESRAKKFQRQHMDSDSSPSSSSTYCNQMMRRRNMTQGRCRPVNTFVHEPLVDVQNV CFQEKVTCKNGQGNCYKSNSSMHITDCRLTNGSRYPNCAYRTSPKERHIIVACEGSPYV PVHFEASVEDST (SEQ ID NO: 117). In some embodiments, the second RNA binding protein comprises or consists of a mutated Rnase1 (Rnase1(K41R, D121E, H119N)) polypeptide. In some embodiments, the Rnase1 (Rnase1(K41R, D121E, H119N)) polypeptide comprises or consists of: KESRAKKFQRQHMDSDSSPSSSSTYCNQMMRRRNMTQGRCRPVNTFVHEPLVDVQNV CFQEKVTCKNGQGNCYKSNSSMHITDCRLTNGSRYPNCAYRTSPKERHIIVACEGSPYV PVNFEASVEDST (SEQ ID NO: 118). In some embodiments, the second RNA binding protein comprises or consists of a mutated Rnase1. In some embodiments, the second RNA binding protein comprises or consists of a mutated Rnase1 (Rnase1(H119N)) polypeptide. In some embodiments, the Rnase1 (Rnase1(H119N)) polypeptide comprises or consists of: KESRAKKFQRQHMDSDSSPSSSSTYCNQMMRRRNMTQGRCKPVNTFVHEPLVDVQNV CFQEKVTCKNGQGNCYKSNSSMHITDCRLTNGSRYPNCAYRTSPKERHIIVACEGSPYV PVNFDASVEDST (SEQ ID NO: 119). In some embodiments, the second RNA binding protein comprises or consists of a mutated Rnase1 (Rnase1(R39D, N67D, N88A, G89D, R91D, H119N)) polypeptide. In some embodiments, the Rnase1 (Rnase1(R39D, N67D, N88A, G89D, R91D, H119N)) polypeptide comprises or consists of: KESRAKKFQRQHMDSDSSPSSSSTYCNQMMRRRNMTQGDCKPVNTFVHEPLVDVQNV CFQEKVTCKDGQGNCYKSNSSMHITDCRLTADSDYPNCAYRTSPKERHIIVACEGSPYV PVNFDASVEDST (SEQ ID NO: 120). In some embodiments, the second RNA binding protein comprises or consists of a mutated Rnase1 (Rnase1(R39D, N67D, N88A, G89D, R91D, H119N)) polypeptide. In some embodiments, the Rnase1 (Rnase1(R39D, N67D, N88A, G89D, R91D, H119N, K41R, D121E)) polypeptide comprises or consists of: KESRAKKFQRQHMDSDSSPSSSSTYCNQMMRRRNMTQGDCRPVNTFVHEPLVDVQNV CFQEKVTCKDGQGNCYKSNSSMHITDCRLTADSDYPNCAYRTSPKERHIIVACEGSPYV PVNFEASVEDST (SEQ ID NO: 121). In some embodiments, the second RNA binding protein comprises or consists of a mutated Rnase1 (Rnase1(R39D, N67D, N88A, G89D, R91D, H119N)) polypeptide. In some embodiments, the Rnase1 (Rnase1(R39D, N67D, N88A, G89D, R91D)) polypeptide comprises or consists of:

(SEQ ID NO: 122)

KESRAKKFQRQHMDSDSSPSSSSTYCNQMMRRRNMTQGDCKPVNTFVHEP
LVDVQNVCFQEKVTCKDGQGNCYKSNSSMHITDCRLTADSDYPNCAYRTS
PKERHIIVACEGSPYVPVHFDASVEDST.

[0133] In some embodiments, the second RNA binding protein comprises or consists of a mutated Rnase1 (Rnase1 (R39D, N67D, N88A, G89D, R91D, H119N, K41R, D121E)) polypeptide comprises or consists of:

(SEQ ID NO: 225)

KESRAKKFQRQHMDSDSSPSSSSTYCNQMMRRRNMTQGDCRPVNTFVHEP
LVDVQNVCFQEKVTCKDGQGNCYKSNSSMHITDCRLTADSDYPNCAYRTS
PKERHIIVACEGSPYVPVNFEASVEDST.

[0134] In some embodiments of the compositions of the disclosure, the second RNA binding protein comprises or consists of a NOB1 polypeptide. In some embodiments, the NOB1 polypeptide comprises or consists of:

(SEQ ID NO: 31)

APVEHVVADAGAFLRHAALQDIGKNIYTIREVVTEIRDKATRRRLAVLPY
ELRFKEPLPEYVRLVTEFSKKTGDYPSLSATDIQVLALTYQLEAEFVGVS
HLKQEPQKVKVSSSIQHPETPLHISGFHLPYKPKPPQETEKGHSACEPEN
LEFSSFMFWRNPLPNIDHELQELLIDRGEDVPSEEEEEEENGFEDRKDDS
DDDGGGWITPSNIKQIQQELEQCDVPEDVRVGCLTTDFAMQNVLLQMGLH
VLAVNGMLIREARSYILRCHGCFKTTSDMSRVFCSHCGNKTLKKVSVTV.

[0135] In some embodiments of the compositions of the disclosure, the second RNA binding protein comprises or consists of an endonuclease. In some embodiments, the second RNA binding protein comprises or consists of an endonuclease V (ENDOV). In some embodiments, the ENDOV polypeptide comprises or consists of: AFSGLQRVGGVDVSFVKGDSVRACASLVVLSFPELEVVYEESRMVSLTAPYVSGFLAFR EVPFLLELVQQLREKEPGLMPQVLLVDGNGVLHHRGEGVACHLGVLTDLPCVGVAKKL LQVDGLENNALHKEKIRLLQTRGDSFPLLGDSGTVLGMALRSHDRSTRPLYISVGHRMS LEAAVRLTCCCCRFRIPEPVRQADICSREHIRKS (SEQ ID NO: 32). In some embodiments, the second RNA binding protein comprises or consists of an endonuclease G (ENDOG) polypeptide. In some embodiments, the ENDOG polypeptide comprises or consists of: AELPPVPGGPRGPGELAKYGLPGLAQLKSRESYVLCYDPRTRGALWVVEQLRPERLRG DGDRRECDFREDDSVHAYHRATNADYRGSGFDRGHLAAAANHRWSQKAMDDTFYLS NVAPQVPHLNQNAWNNLEKYSRSLTRSYQNVYVCTGPLFLPRTEADGKSYVKYQVIGK NHVAVPTHFEKVLILEAAGGQIELRTYVMPNAPVDEAIPLERFLVPIESIERASGLLEVPNI LARAGSLKAITAGSK (SEQ ID NO: 33). In some embodiments, the second RNA binding protein comprises or consists of an endonuclease D1 (ENDOD1) polypeptide. In some embodiments, the ENDOD1 polypeptide comprises or consists of: RLVGEEEAGFGECDKFFYAGTPPAGLAAD SHVKICQRAEGAERFATLYSTRDRIPVYSA FRAPRPAPGGAEQRWLVEPQIDDPNSNLEEAINEAEAITSVNSLGSKQALNTDYLDSDYQ RGQLYPFSLSSDVQVATFTLTNSAPMTQSFQERWYVNLHSLMDRALTPQCGSGEDLYIL TGTVPSDYRVKDKVAVPEFVWLAACCAVPGGGWAMGFVKHTRDSDIIEDVMVKDLQ KLLPFNPQLFQNNCGETEQDTEKMKKILEVVNQIQDEERMVQSQKSSSPLSSTRSKRSTL LPPEASEGSSSFLGKLMGFIATPFIKLFQLIYYLVVAILKNIVYFLWCVTKQVINGIESCLY RLGSATISYFMAIGEELVSIPWKVLKVVAKVIRALLRILCCLLKAICRVLSIPVRVLVDVA TFPVYTMGAIPIVCKDIALGLGGTVSLLFDTAFGTLGGLFQVVFSVCKRIGYKVTFDNSG EL (SEQ ID NO: 34). In some embodiments, the second RNA binding protein comprises or consists of a Human flap endonuclease-1 (hFEN1) polypeptide. In some embodiments, the hFEN1 polypeptide comprises or consists of: MGIQGLAKLIADVAPSAIRENDIKSYFGRKVAIDASMSIYQFLIAVRQGGDVLQNEEGET TSHLMGMFYRTIRMMENGIKPVYVFDGKPPQLKSGELAKRSERRAEAEKQLQQAQAAG AEQEVEKFTKRLVKVTKQHNDECKHLLSLMGIPYLDAPSEAEASCAALVKAGKVYAAA TEDMDCLTFGSPVLMRHLTASEAKKLPIQEFHLSRILQELGLNQEQFVDLCILLGSDYCE SIRGIGPKRAVDLIQKHKSIEEIVRRLDPNKYPVPENWLHKEAHQLFLEPEVLDPESVELK WSEPNEEELIKFMCGEKQFSEERIRSGVKRLSKSRQGSTQGRLDDFFKVTGSLSSAKRKE PEPKGSTKKKAKTGAAGKFKRGK (SEQ ID NO: 35). In some embodiments, the second RNA binding protein comprises or consists of a DNA repair endonuclease XPF (ERCC4) polypeptide. In some embodiments, the ERCC4 polypeptide comprises or consists of:

(SEQ ID NO: 124)

MESGQPARRIAMAPLLEYERQLVLELLDTDGLVVCARGLGADRLLYHFLQ
LHCHPACLVLVLNTQPAEEEYFINQLKIEGVEHLPRRVTNEITSNSRYEV
YTQGGVIFATSRILVVDFLTDRIPSDLITGILVYRAHRIIESCQEAFILR
LFRQKNKRGFIKAFTDNAVAFDTGFCHVERVMRNLFVRKLYLWPRFHVAV
NSFLEQHKPEVVEIHVSMTPTMLAIQTAILDILNACLKELKCHNPSLEVE
DLSLENAIGKPFDKTIRHYLDPLWHQLGAKTKSLVQDLKILRTLLQYLSQ
YDCVTFLNLLESLRATEKAFGQNSGWLFLDSSTSMFINARARVYHLPDAK
MSKKEKISEKMEIKEGEGILWG.

[0136] In some embodiments of the compositions of the disclosure, the second RNA binding protein comprises or consists of an Endonuclease III-like protein 1 (NTHL) polypeptide. In some embodiments, the NTHL polypeptide comprises or consists of:

(SEQ ID NO: 123)

CSPQESGMTALSARMLTRSRSLGPGAGPRGCREEPGPLRRREAAAEARKS
HSPVKRPRKAQRLRVAYEGSDSEKGEGAEPLKVPVWEPQDWQQQLVNIRA
MRNKKDAPVDHLGTEHCYDSSAPPKVRRYQVLLSLMLSSQTKDQVTAGAM
QRLRARGLTVDSILQTDDATLGKLIYPVGFWRSKVKYIKQTSAILQQHYG
GDIPASVAELVALPGVGPKMAHLAMAVAWGTVSGIAVDTHVHRIANRLRW
TKKATKSPEETRAALEEWLPRELWHEINGLLVGFGQQTCLPVHPRCHACL
NQALCPAAQGL.

[0137] In some embodiments of the compositions of the disclosure, the second RNA binding protein comprises or consists of a human Schlafen 14 (hSLFN14) polypeptide. In some embodiments, the hSLFN14 polypeptide comprises or consists of:

(SEQ ID NO: 36)

ESTHVEFKRFTTKKVIPRIKEMLPHYVSAFANTQGGYVLIGVDDKSKEVV
GCKWEKVNPDLLKKEIENCIEKLPTFHFCCEKPKVNFTTKILNVYQKDVL
DGYVCVIQVEPFCCVVFAEAPDSWIMKDNSVTRLTAEQWVVMMLDTQSAP
PSLVTDYNSCLISSASSARKSPGYPIKVHKFKEALQ.

[0138] In some embodiments of the compositions of the disclosure, the second RNA binding protein comprises or consists of a human beta-lactamase-like protein 2 (hLACTB2) polypeptide. In some embodiments, the hLACTB2 polypeptide comprises or consists of:

(SEQ ID NO: 37)

TLQGTNTYLVGTGPRRILIDTGEPAIPEYISCLKQALTEFNTAIQEIVVT
HWHRDHSGGIGDICKSINNDTTYCIKKLPRNPQREEIIGNGEQQYVYLKD
GDVIKTEGATLRVLYTPGHTDDHMALLLEEENAIFSGDCILGEGTTVFED
LYDYMNSLKELLKIKADIIYPGHGPVIHNAEAKIQQYISHRNIREQQILT
LFRENFEKSFTVMELVKIIYKNTPENLHEMAKHNLLLHLKKLEKEGKIFS
NTDPDKKWKAHL.

[0139] In some embodiments of the compositions of the disclosure, the second RNA binding protein comprises or consists of an apurinic/apyrimidinic (AP) endodeoxyribonuclease (APEX) polypeptide. In some embodiments, the second RNA binding protein comprises or consists of an apurinic/apyrimidinic (AP) endodeoxyribonuclease (APEX2) polypeptide. In some embodiments, the APEX2 polypeptide comprises or consists of: MLRVVSWNINGIRRPLQGVANQEPSNCAAVAVGRILDELDADIVCLQETKVTRDALTEP LAIVEGYNSYFSFSRNRSGYSGVATFCKDNATPVAAEEGLSGLFATQNGDVGCYGNMD EFTQEELRALDSEGRALLTQHKIRTWEGKEKTLTLINVYCPHADPGRPERLVFKMRFYR LLQIRAEALLAAGSHVIILGDLNTAHRPIDHWDAVNLECFEEDPGRKWMDSLLSNLGCQ SASHVGPFIDSYRCFQPKQEGAFTCWSAVTGARHLNYGSRLDYVLGDRTLVIDTFQASF LLPEVMGSDHCPVGAVLSVSSVPAKQCPPLCTRFLPEFAGTQLKILRFLVPLEQSPVLEQ STLQHNNQTRVQTCQNKAQVRSTRPQPSQVGSSRGQKNLKSYFQPSPSCPQASPDIELPS LPLMSALMTPKTPEEKAVAKVVKGQAKTSEAKDEKELRTSFWKSVLAGPLRTPLCGGH REPCVMRTVKKPGPNLGRRFYMCARPRGPPTDPSSRCNFFLWSRPS (SEQ ID NO: 38). In some embodiments, the APEX2 polypeptide comprises or consists of: MLRVVSWNINGIRRPLQGVANQEPSNCAAVAVGRILDELDADIVCLQETKVTRDALTEP LAIVEGYNSYFSFSRNRSGYSGVATFCKDNATPVAAEEGLSGLFATQNGDVGCYGNMD EFTQEELRALDSEGRALLTQHKIRTWEGKEKTLTLINVYCPHADPGRPERLVFKMRFYR LLQIRAEALLAAGSHVIILGDLNTAHRPIDHWDAVNLECFEEDPGRKWMDSLLSNLGCQ SASHVGPFIDSYRCFQPKQEGAFTCWSAVTGARHLNYGSRLDYVLGDRTLVIDTFQASF LLPEVMGSDHCPVGAVLSVSSVPAKQCPPLCTRFLPEFAGTQLKILRFLVPLEQSP (SEQ ID NO: 39). In some embodiments, the second RNA binding protein comprises or consists of an apurinic or apyrimidinic site lyase (APEX1) polypeptide. In some embodiments, the APEX1 polypeptide comprises or consists of:

(SEQ ID NO: 125)

PKRGKKGAVAEDGDELRTEPEAKKSKTAAKKNDKEAAGEGPALYEDPPDQ
KTSPSGKPATLKICSWNVDGLRAWIKKKGLDWVKEEAPDILCLQETKCSE
NKLPAELQELPGLSHQYWSAPSDKEGYSGVGLLSRQCPLKVSYGIGDEEH
DQEGRVIVAEFDSFVLVTAYVPNAGRGLVRLEYRQRWDEAFRKFLKGLAS
RKPLVLCGDLNVAHEEIDLRNPKGNKKNAGFTPQERQGFGELLQAVPLAD
SFRHLYPNTPYAYTFWTYMMNARSKNVGWRLDYFLLS.

[0140] In some embodiments of the compositions of the disclosure, the second RNA binding protein comprises or consists of an angiogenin (ANG) polypeptide. In some embodiments, the ANG polypeptide comprises or consists of:

(SEQ ID NO: 40)

[sequence omitted]

[0141] In some embodiments of the compositions of the disclosure, the second RNA binding protein comprises or consists of a heat responsive protein 12 (HRSP12) polypeptide. In some embodiments, the HRSP12 polypeptide comprises or consists of:

(SEQ ID NO: 41)

SSLIRRVISTAKAPGAIGPYSQAVLVDRTIYISGQIGMDPSSGQLVSGGV
AEEAKQALKNMGEILKAAGCDFTNVVKTTVLLADINDFNTVNEIYKQYFK
SNFPARAAYQVAALPKGSRIEIEAVAIQGPLTTASL.

[0142] In some embodiments of the compositions of the disclosure, the second RNA binding protein comprises or consists of a Zinc Finger CCCH-Type Containing 12A (ZC3H12A) polypeptide. In some embodiments, the ZC3H12A polypeptide comprises or consists of: GGGTPKAPNLEPPLPEEEKEGSDLRPVVIDGSNVAMSHGNKEVF SCRGILLAVNWFLER GHTDITVFVPSWRKEQPRPDVPITDQHILRELEKKKILVFTPSRRVGGKRVVCYDDRFIV KLAYESDGIVVSNDTYRDLQGERQEWKRFIEERLLMYSFVNDKFMPPDDPLGRHGPSLD NFLRKKPLTLE (SEQ ID NO: 42). In some embodiments, the ZC3H12A polypeptide comprises or consists of:

(SEQ ID NO: 43)

SGPCGEKPVLEASPTMSLWEFEDSHSRQGTPRPGQELAAEEASALELQMK
VDFFRKLGYSSTEIHSVLQKLGVQADTNTVLGELVKHGTATERERQTSPD
PCPQLPLVPRGGGTPKAPNLEPPLPEEEKEGSDLRPVVIDGSNVAMSHGN
KEVFSCRGILLAVNWFLERGHTDITVFVPSWRKEQPRPDVPITDQHILRE
LEKKKILVFTPSRRVGGKRVVCYDDRFIVKLAYESDGIVVSNDTYRDLQG
ERQEWKRFIEERLLMYSFVNDKFMPPDDPLGRHGPSLDNFLRKKPLTLEH
RKQPCPYGRKCTYGIKCRFFHPERPSCPQRSVADELRANALLSPPRAPSK
DKNGRRPSPSSQSSSLLTESEQCSLDGKKLGAQASPGSRQEGLTQTYAPS
GRSLAPSGGSGSSFGPTDWLPQTLDSLPYVSQDCLDSGIGSLESQMSELW
GVRGGGPGEPGPPRAPYTGYSPYGSELPATAAFSAFGRAMGAGHFSVPAD
YPPAPPAFPPREYWSEPYPLPPPTSVLQEPPVQSPGAGRSPWGRAGSLAK
EQASVYTKLCGVFPPHLVEAVMGRFPQLLDPQQLAAEILSYKSQHPSE.

[0143] In some embodiments of the compositions of the disclosure, the second RNA binding protein comprises or consists of a Reactive Intermediate Imine Deaminase A (RIDA) polypeptide. In some embodiments, the RIDA polypeptide comprises or consists of:

(SEQ ID NO: 44)

SSLIRRVISTAKAPGAIGPYSQAVLVDRTIYISGQIGMDPSSGQLVSGGV
AEEAKQALKNMGEILKAAGCDFTNVVKTTVLLADINDFNTVNEIYKQYFK
SNFPARAAYQVAALPKGSRIEIEAVAIQGPLTTASL.

[0144] In some embodiments of the compositions of the disclosure, the second RNA binding protein comprises or consists of a Phospholipase D Family Member 6 (PDL6) polypeptide. In some embodiments, the PDL6 polypeptide comprises or consists of:

(SEQ ID NO: 126)

EALFFPSQVTCTEALLRAPGAELAELPEGCPCGLPHGESALSRLLRALLA
ARASLDLCLFAFSSPQLGRAVQLLHQRGVRVRVVTDCDYMALNGSQIGLL
RKAGIQVRHDQDPGYMHHKFAIVDKRVLITGSLNWTTQAIQNNRENVLIT
EDDEYVRLFLEEFERIWEQFNPTKYTFFPPKKSHGSCAPPVSRAGGRLLS
WHRTCGTSSESQT.

[0145] In some embodiments of the compositions of the disclosure, the second RNA binding protein comprises or consists of a mitochondrial ribonuclease P catalytic subunit (KIAA0391) polypeptide. In some embodiments, the KIAA0391 polypeptide comprises or consists of:

(SEQ ID NO: 127)

KARYKTLEPRGYSLLIRGLIHSDRWREALLLLEDIKKVITPSKKNYNDCI
QGALLHQDVNTAWNLYQELLGHDIVPMLETLKAFFDFGKDIKDDNYSNKL
LDILSYLRNNQLYPGESFAHSIKTWFESVPGKQWKGQFTTVRKSGQCSGC
GKTIESIQLSPEEYECLKGKIMRDVIDGGDQYRKTTPQELKRFENFIKSR
PPFDVVIDGLNVAKMFPKVRESQLLLNVVSQLAKRNLRLLVLGRKHMLRR
SSQWSRDEMEEVQKQASCFFADDISEDDPFLLYATLHSGNHCRFITRDLM
RDHKACLPDAKTQRLFFKWQQGHQLAIVNRFPGSKLTFQRILSYDTVVQT
TGDSWHIPYDEDLVERCSCEVPTKWLCLHQKT.

[0146] In some embodiments of the compositions of the disclosure, the second RNA binding protein comprises or consists of an argonaute 2 (AGO2) polypeptide. In some embodiments of the compositions of the disclosure, the AGO2 polypeptide comprises or consists of:

(SEQ ID NO: 128)

SVEPMFRHLKNTYAGLQLVVVILPGKTPVYAEVKRVGDTVLGMATQCVQM
KNVQRTTPQTLSNLCLKINVKLGGVNNILLPQGRPPVFQQPVIFLGADVT
HPPAGDGKKPSIAAVVGSMDAHPNRYCATVRVQQHRQEIIQDLAAMVREL
LIQFYKSTRFKPTRIIFYRDGVSEGQFQQVLHHELLAIREACIKLEKDYQ
PGITFIVVQKRHHTRLFCTDKNERVGKSGNIPAGTTVDTKITHPTEFDFY
LCSHAGIQGTSRPSHYHVLWDDNRFSSDELQILTYQLCHTYVRCTRSVSI
PAPAYYAHLVAFRARYHLVDKEHDSAEGSHTSGQSNGRDHQALAKAVQVH
QDTLRTMYFA.

[0147] In some embodiments of the compositions of the disclosure, the second RNA binding protein comprises or consists of a mitochondrial nuclease EXOG (EXOG) polypeptide. In some embodiments, the EXOG polypeptide comprises or consists of:

(SEQ ID NO: 129)

QGAEGALTGKQPDGSAEKAVLEQFGFPLTGTEARCYTNHALSYDQAKRVP
RWVLEHISKSKIMGDADRKHCKFKPDPMPPTFSAFNEDYVGSGWSRGHMA
PAGNNKFSSKAMAETFYLSNIVPQDFDNNSGYWNRIEMYCRELTERFEDV
WVVSGPLTLPQTRGDGKKIVSYQVIGEDNVAVPSHLYKVILARRSSVSTE
PLALGAFVVPNEAIGFQPQLTEFQVSLQDLEKLSGLVFFPHLDRTSDIRN
ICSVDTCKLLDFQEFTLYLSTRKIEGARSVLRLEKIMENLKNAEIEPDDY
FMSRYEKKLEELKAKEQSGTQIRKPS.

[0148] In some embodiments of the compositions of the disclosure, the second RNA binding protein comprises or consists of a Zinc Finger CCCH-Type Containing 12D (ZC3H12D) polypeptide. In some embodiments, the ZC3H12D polypeptide comprises or consists of:

(SEQ ID NO: 130)

EHPSKMEFFQKLGYDREDVLRVLGKLGEGALVNDVLQELIRTGSRPGALE
HPAAPRLVPRGSCGVPDSAQRGPGTALEEDFRTLASSLRPIVIDGSNVAM
SHGNKETFSCRGIKLAVDWFRDRGHTYIKVFVPSWRKDPPRADTPIREQH
VLAELERQAVLVYTPSRKVHGKRLVCYDDRYIVKVAYEQDGVIVSNDNYR
DLQSENPEWKWFIEQRLLMFSFVNDRFMPPDDPLGRHGPSLSNFLSRKPK
PPEPSWQHCPYGKKCTYGIKCKFYHPERPHHAQLAVADELRAKTGARPGA
GAEEQRPPRAPGGSAGARAAPREPFAHSLPPARGSPDLAALRGSFSRLAF
SDDLGPLGPPLPVPACSLTPRLGGPDWVSAGGRVPGPLSLPSPESQFSPG
DLPPPPGLQLQPRGEHRPRDLHGDLLSPRRPPDDPWARPPRSDRFPGRSV
WAEPAWGDGATGGLSVYATEDDEGDARARARIALYSVFPRDQVDRVMAAF
PELSDLARLILLVQRCQSAGAPLGKP.

[0149] In some embodiments of the compositions of the disclosure, the second RNA binding protein comprises or consists of an endoplasmic reticulum to nucleus signaling 2 (ERN2) polypeptide. In some embodiments, the ERN2 polypeptide comprises or consists of:

(SEQ ID NO: 131)

RQQQPQVVEKQQETPLAPADFAHISQDAQSLHSGASRRSQKRLQSPSKQA
QPLDDPEAEQLTVVGKISFNPKDVLGRGAGGTFVFRGQFEGRAVAVKRLL
RECFGLVRREVQLLQESDRHPNVLRYFCTERGPQFHYIALELCRASLQEY
VENPDLDRGGLEPEVVLQQLMSGLAHLHSLHIVHRDLKPGNILITGPDSQ
GLGRVVLSDFGLCKKLPAGRCSFSLHSGIPGTEGWMAPELLQLLPPDSPT
SAVDIFSAGCVFYYVLSGGSHPFGDSLYRQANILTGAPCLAHLEEEVHDK
VVARDLVGAMLSPLPQPRPSAPQVLAHPFFWSRAKQLQFFQDVSDWLEKE
SEQEPLVRALEAGGCAVVRDNWHEHISMPLQTDLRKFRSYKGTSVRDLLR
AVRNKKHHYRELPVEVRQALGQVPDGFVQYFTNRFPRLLLHTHRAMRSCA
SESLFLPYYPPDSEARRPCPGATGR.

[0150] In some embodiments of the compositions of the disclosure, the second RNA binding protein comprises or consists of a pelota mRNA surveillance and ribosome rescue factor (PELO) polypeptide. In some embodiments, the PELO polypeptide comprises or consists of:

(SEQ ID NO: 132)

KLVRKNIEKDNAGQVTLVPEEPEDMWHTYNLVQVGDSLRASTIRKVQTES
STGSVGSNRVRTTLTLCVEAIDFDSQACQLRVKGTNIQENEYVKMGAYHT
IELEPNRQFTLAKKQWDSVVLERIEQACDPAWSADVAAVVMQEGLAHICL
VTPSMTLTRAKVEVNIPRKRKGNCSQHDRALERFYEQVVQAIQRHIHFDV
VKCILVASPGFVREQFCDYLFQQAVKTDNKLLLENRSKFLQVHASSGHKY
SLKEALCDPTVASRLSDTKAAGEVKALDDFYKMLQHEPDRAFYGLKQVEK
ANEAMAIDTLLISDELFRHQDVATRSRYVRLVDSVKENAGTVRIFSSLHV
SGEQLSQLTGVAAILRFPVPELSDQEGDSSSEED.

[0151] In some embodiments of the compositions of the disclosure, the second RNA binding protein comprises or consists of a YBEY metallopeptidase (YBEY) polypeptide. In some embodiments, the YBEY polypeptide comprises or consists of:

(SEQ ID NO: 133)

SLVIRNLQRVIPIRRAPLRSKIEIVRRILGVQKFDLGIICVDNKNIQHIN
RIYRDRNVPTDVLSFPFHEHLKAGEFPQPDFPDDYNLGDIFLGVEYIFHQ
CKENEDYNDVLTVTATHGLCHLLGFTHGTEAEWQQMFQKEKAVLDELGRR
TGTRLQPLTRGLFGGS.

[0152] In some embodiments of the compositions of the disclosure, the second RNA binding protein comprises or consists of a cleavage and polyadenylation specific factor 4 like (CPSF4L) polypeptide. In some embodiments, the CPSF4L comprises or consists of:

(SEQ ID NO: 134)

QEVIAGLERFTFAFEKDVEMQKGTGLLPFQGMDKSASAVCNFFTKGLCEK
GKLCPFRHDRGEKMVVCKHWLRGLCKKGDHCKFLHQYDLTRMPECYFYSK
FGDCSNKECSFLHVKPAFKSQDCPWYDQGFCKDGPLCKYRHVPRIMCLNY
LVGFCPEGPKCQFAQKIREFKLLPGSKI.

[0153] In some embodiments of the compositions of the disclosure, the second RNA binding protein comprises or consists of an hCG_2002731 polypeptide. In some embodiments, the hCG_2002731 polypeptide comprises or consists of: KLVRKNIEKDNAGQVTLVPEEPEDMWHTYNLVQVGDSLRASTIRKVQTESSTGSVGSN RVRTTLTLCVEAIDFD SQACQLRVKGTNIQENEYVKMGAYHTIELEPNRQFTLAKKQW DSVVLERIEQACDPAWSADVAAVVMQEGLAHICLVTP SMTLTRAKVEVNIPRKRKGNC SQHDRALEREYEQVVQAIQRHIHFDVVKCILVASPGFVREQFCDYMFQQAVKTDNKLLL ENRSKFLQVHASSGHKYSLKEALCDPTVASRLSDTKAAGEVKALDDFYKMLQHEPDRA FYGLKQVEKANEAMAIDTLLISDELFRHQDVATRSRYVRLVDSVKENAGTVRIFSSLHV SGEQLSQLTGVAAILRFPVPELSDQEGDSSSEED (SEQ ID NO: 135). In some embodiments, the hCG_2002731 polypeptide comprises or consists of:

(SEQ ID NO: 136)

DPAWSADVAAVVMQEGLAHICLVTPSMTLTRAKVEVNIPRKRKGNCSQHD
RALERFYEQVVQAIQRHIHFDVVKCILVASPGFVREQFCDYMFQQAVKTD
NKLLLENRSKFLQVHASSGHKYSLKEALCDPTVASRLSDTKAAGEVKALD
DFYKMLQHEPDRAFYGLKQVEKANEAMAIDTLLISDELFRHQDVATRSRY
VRLVDSVKENAGTVRIFSSLHVSGEQLSQLTGVAAILRFPVPELSDQEGD
SSSEED.

[0154] In some embodiments of the compositions of the disclosure, the second RNA binding protein comprises or consists of an Excision Repair Cross-Complementation Group 1 (ERCC1) polypeptide. In some embodiments, the ERCC1 polypeptide comprises or consists of:

(SEQ ID NO: 137)

MDPGKDKEGVPQPSGPPARKKFVIPLDEDEVPPGVRGNPVLKFVRNVPWE
FGDVIPDYVLGQSTCALFLSLRYHNLHPDYIHGRLQSLGKNFALRVLLVQ
VDVKDPQQALKELAKMCILADCTLILAWSPEEAGRYLETYKAYEQKPADL
LMEKLEQDFVSRVTECLTTVKSVNKTDSQTLLTTFGSLEQLIAASREDLA
LCPGLGPQK.

[0155] In some embodiments of the compositions of the disclosure, the second RNA binding protein comprises or consists of a ras-related C3 botulinum toxin substrate 1 isoform (RAC1) polypeptide. In some embodiments, the RAC1 polypeptide comprises or consists of:

(SEQ ID NO: 138)

KESRAKKFQRQHMDSDSSPSSSSTYCNQMMRRRNMTQGRCKPVNTFVHEP
LVDVQNVCFQEKVTCKNGQGNCYKSNSSMHITDCRLTNGSRYPNCAYRTS
PKERHIIVACEGSPYVPVHFDASVEDST.

[0156] In some embodiments of the compositions of the disclosure, the second RNA binding protein comprises or consists of a Ribonuclease A A1 (RAA1) polypeptide. In some embodiments, the RAA1 polypeptide comprises or consists of:

(SEQ ID NO: 139)

[sequence omitted]

[0157] In some embodiments of the compositions of the disclosure, the second RNA binding protein comprises or consists of a Ras Related Protein (RAB1) polypeptide. In some embodiments, the RAB1 polypeptide comprises or consists of:

(SEQ ID NO: 140)

GLGLVQPSYGQDGMYQRFLRQHVHPEETGGSDRYCNLMMQRRKMTLYHCK
RFNTFIHEDIWNIRSICSTTNIQCKNGKMNCHEGVVKVTDCRDTGSSRAP
NCRYRAIASTRRVVIACEGNPQVPVHFDG.

[0158] In some embodiments of the compositions of the disclosure, the second RNA binding protein comprises or consists of a DNA Replication Helicase/Nuclease 2 (DNA2) polypeptide. In some embodiments, the DNA2 polypeptide comprises or consists of:

(SEQ ID NO: 141)

XSAVDNILLKLAKFKIGFLRLGQIQKVHPAIQQFTEQEICRSKSIKSLAL
LEELYNSQLIVATTCMGINHPIFSRKIFDFCIVDEASQISQPICLGPLFF
SRRFVLVGDHQQLPPLVLNREARALGMSESLFKRLEQNKSAVVQLTVQYR
MNSKIMSLSNKLTYEGKLECGSDKVANAVINLRHFKDVKLELEFYADYSD
NPWLMGVFEPNNPVCFLNTDKVPAPEQVEKGGVSNVTEAKLIVFLTSIFV
KAGCSPSDIGIIAPYRQQLKIINDLLARSIGMVEVNTVDKYQGRDKSIVL
VSFVRSNKDGTVGELLKDWRRLNVAITRAKHKLILLGCVPSLNCYPPLEK
LLNHLNSEKLISFFFCIWSHLIALL.

[0159] In some embodiments of the compositions of the disclosure, the second RNA binding protein comprises or consists of a FLJ35220 polypeptide. In some embodiments, the FLJ35220 polypeptide comprises or consists of:

(SEQ ID NO: 142)

MALRSHDRSTRPLYISVGHRMSLEAAVRLTCCCCRFRIPEPVRQADICSR
EHIRKSLGLPGPPTPRSPKAQRPVACPKGDSGESSALC.

[0160] In some embodiments of the compositions of the disclosure, the second RNA binding protein comprises or consists of a FLJ13173 polypeptide. In some embodiments, the FLJ13173 polypeptide comprises or consists of:

(SEQ ID NO: 143)

CYTNHALSYDQAKRVPRWVLEHISKSKIMGDADRKHCKFKPDPNIPPTFS
AFNEDYVGSGWSRGHMAPAGNNKFSSKAMAETFYLSNIVPQDFDNNSGYW
NRIEMYCRELTERFEDVWVVSGPLTLPQTRGDGKKIVSYQVIGEDNVAVP
SHLYKVILARRSSVSTEPLALGAFVVPNEAIGFQPQLTEFQVSLQDLEKL
SGLVFFPHLDRT.

[0161] In some embodiments of the compositions of the disclosure, the second RNA binding protein comprises or consists of Teneurin Transmembrane Protein (TENM) polypeptide. In some embodiments, the second RNA binding protein comprises or consists of Teneurin Transmembrane Protein 1 (TENM1) polypeptide. In some embodiments, the TENM1 polypeptide comprises or consists of: VTVSQMTSVLNGKTRRFADIQLQHGALCFNIRYGTTVEEEKNHVLEIARQRAVAQAWT KEQRRLQEGEEGIRAWTEGEKQQLLSTGRVQGYDGYFVLSVEQYLELSDSANNIHFMR QSEIGRR (SEQ ID NO: 144). In some embodiments, the second RNA binding protein comprises or consists of Teneurin Transmembrane Protein 2 (TENM2) polypeptide. In some embodiments, the TENM2 polypeptide comprises or consists of:

(SEQ ID NO: 145)

TVSQPTLLVNGKTRRFTNIEFQYSTLLLSIRYGLTPDTLDEEKARVLDQA
RQRALGTAWAKEQQKARDGREGSRLWTEGEKQQLLSTGRVQGYEGYYVLP
VEQYPELADSSSNIQFLRQNEMGKR.

In some embodiments of the compositions of the disclosure, the second RNA binding protein comprises or consists of Ribonuclease Kappa (RNAseK) polypeptide. In some embodiments, the RNAseK polypeptide comprises or consists of:

(SEQ ID NO: 204)

MGWLRPGPRPLCPPARASWAFSHRFPSPLAPRRSPTPFFMASLLCCGPKL
AACGIVLSAWGVIMLIMLGIFFNVHSAVLIEDVPFTEKDFENGPQNIYNL
YEQVSYNCFIAAGLYLLLGGFSFCQVRLNKRKEYMVR.

[0162] In some embodiments of the compositions of the disclosure, the second RNA binding protein comprises or consists of a transcription activator-like effector nuclease (TALEN) polypeptide or a nuclease domain thereof.

[0163] In some embodiments of the compositions of the disclosure, the second RNA binding protein comprises or consists a zinc finger nuclease polypeptide or a nuclease domain thereof. In some embodiments, the second RNA binding protein comprises or consists of a ZNF638 polypeptide or a nuclease domain thereof.

[0164] In some embodiments of the compositions of the disclosure, the second RNA binding protein comprises or consists of a PIN domain derived from the human SMG6 protein, also commonly known as telomerase-binding protein EST1A isoform 3, NCBI Reference Sequence: NP_001243756.1. In some embodiments, the PIN from hSMG6 is used herein in the form of a Cas fusion protein and as an internal control.

### Guide RNA

[0165] The terms guide RNA (gRNA) and single guide RNA (sgRNA) are used interchangeably throughout the disclosure.

[0166] Guide RNAs (gRNAs) of the disclosure may comprise of a spacer sequence and a scaffolding sequence. In some embodiments, a guide RNA is a single guide RNA (sgRNA) comprising a contiguous spacer sequence and scaffolding sequence. In some embodiments, the spacer sequence and the scaffolding sequence are contiguous. In some embodiments, a scaffold sequence comprises a “direct repeat” (DR) sequence. DR sequences refer to the repetitive sequences in the CRISPR locus (naturally-occurring in a bacterial genome or plasmid) that are interspersed with the spacer sequences. It is well known that one would be able to infer the DR sequence of a corresponding Cas protein if the sequence of the associated CRISPR locus is known. In some embodiments, the spacer sequence and the scaffolding sequence are not contiguous. In some embodiments, a sequence encoding a guide RNA of the disclosure comprises or consists of a spacer sequence and a scaffolding sequence, that are separated by a linker sequence. In some embodiments, the linker sequence may comprise or consist of 1, 2, 3, 4, 5, 6, 7, 8, 9, 10, 15, 20, 25, 30, 35, 40, 45, 50 or any number of nucleotides in between. In some embodiments, the linker sequence may comprise at least 1, 2, 3, 4, 5, 6, 7, 8, 9, 10, 15, 20, 25, 30, 35, 40, 45, 50 or any number of nucleotides in between.

[0167] Guide RNAs (gRNAs) of the disclosure may comprise non-naturally occurring nucleotides. In some embodiments, a guide RNA of the disclosure or a sequence encoding the guide RNA comprises or consists of modified or synthetic RNA nucleotides. Exemplary modified RNA nucleotides include, but are not limited to, pseudouridine (Ψ), dihydrouridine (D), inosine (I), and 7-methylguanosine (m7G), hypoxanthine, xanthine, xanthosine, 7-methylguanine, 5, 6-Dihydrouracil, 5-methylcytosine, 5-methylcytidine, 5-hydropxymethylcytosine, isoguanine, and isocytosine.

[0168] Guide RNAs (gRNAs) of the disclosure may bind modified RNA within a target sequence. Within a target sequence, guide RNAs (gRNAs) of the disclosure may bind modified RNA. Exemplary epigenetically or post-transcriptionally modified RNA include, but are not limited to, 2′-O-Methylation (2′-OMe) (2′-O-methylation occurs on the oxygen of the free 2′-OH of the ribose moiety), N6-methyladenosine (m6A), and 5-methylcytosine (m5C).

[0169] In some embodiments of the compositions of the disclosure, a guide RNA of the disclosure comprises at least one sequence encoding a non-coding C/D box small nucleolar RNA (snoRNA) sequence. In some embodiments, the snoRNA sequence comprises at least one sequence that is complementary to the target RNA, wherein the target sequence of the RNA molecule comprises at least one 2′-OMe. In some embodiments, the snoRNA sequence comprises at least one sequence that is complementary to the target RNA, wherein the at least one sequence that is complementary to the target RNA comprises a box C motif (RUGAUGA) and a box D motif (CUGA).

[0170] Spacer sequences of the disclosure bind to the target sequence of an RNA molecule. Spacer sequences of the disclosure may comprise a CRISPR RNA (crRNA). Spacer sequences of the disclosure comprise or consist of a sequence having sufficient complementarity to a target sequence of an RNA molecule to bind selectively to the target sequence. Upon binding to a target sequence of an RNA molecule, the spacer sequence may guide one or more of a scaffolding sequence and a fusion protein to the RNA molecule. In some embodiments, a sequence having sufficient complementarity to a target sequence of an RNA molecule to bind selectively to the target sequence has at least 50%, 55%, 60%, 65%, 70%, 75%, 80%, 85%, 90%, 95%, 96, 97%, 98%, 99%, or any percentage identity in between to the target sequence. In some embodiments, a sequence having sufficient complementarity to a target sequence of an RNA molecule to bind selectively to the target sequence has 100% identity the target sequence.

[0171] Scaffolding sequences of the disclosure bind the first RNA-binding polypeptide of the disclosure. Scaffolding sequences of the disclosure may comprise a trans acting RNA (tracrRNA). Scaffolding sequences of the disclosure comprise or consist of a sequence having sufficient complementarity to a target sequence of an RNA molecule to bind selectively to the target sequence. Upon binding to a target sequence of an RNA molecule, the scaffolding sequence may guide a fusion protein to the RNA molecule. In some embodiments, a sequence having sufficient complementarity to a target sequence of an RNA molecule to bind selectively to the target sequence has at least 50%, 55%, 60%, 65%, 70%, 75%, 80%, 85%, 90%, 95%, 96, 97%, 98%, 99%, or any percentage identity in between to the target sequence. In some embodiments, a sequence having sufficient complementarity to a target sequence of an RNA molecule to bind selectively to the target sequence has 100% identity the target sequence. Alternatively, or in addition, in some embodiments, scaffolding sequences of the disclosure comprise or consist of a sequence that binds to a first RNA binding protein or a second RNA binding protein of a fusion protein of the disclosure. In some embodiments, scaffolding sequences of the disclosure comprise a secondary structure or a tertiary structure. Exemplary secondary structures include, but are not limited to, a helix, a stem loop, a bulge, a tetraloop and a pseudoknot. Exemplary tertiary structures include, but are not limited to, an A-form of a helix, a B-form of a helix, and a Z-form of a helix. Exemplary tertiary structures include, but are not limited to, a twisted or helicized stem loop. Exemplary tertiary structures include, but are not limited to, a twisted or helicized pseudoknot. In some embodiments, scaffolding sequences of the disclosure comprise at least one secondary structure or at least one tertiary structure. In some embodiments, scaffolding sequences of the disclosure comprise one or more secondary structure(s) or one or more tertiary structure(s).

[0172] In some embodiments of the compositions of the disclosure, a guide RNA or a portion thereof selectively binds to a tetraloop motif in an RNA molecule of the disclosure. In some embodiments, a target sequence of an RNA molecule comprises a tetraloop motif. In some embodiments, the tetraloop motif is a “GRNA” motif comprising or consisting of one or more of the sequences of GAAA, GUGA, GCAA or GAGA.

[0173] In some embodiments of the compositions of the disclosure, a guide RNA or a portion thereof that binds to a target sequence of an RNA molecule hybridizes to the target sequence of the RNA molecule. In some embodiments, a guide RNA or a portion thereof that binds to a first RNA binding protein or to a second RNA binding protein covalently binds to the first RNA binding protein or to the second RNA binding protein. In some embodiments, a guide RNA or a portion thereof that binds to a first RNA binding protein or to a second RNA binding protein non-covalently binds to the first RNA binding protein or to the second RNA binding protein.

[0174] In some embodiments of the compositions of the disclosure, a guide RNA or a portion thereof comprises or consists of between 10 and 100 nucleotides, inclusive of the endpoints. In some embodiments, a spacer sequence of the disclosure comprises or consists of between 10 and 30 nucleotides, inclusive of the endpoints. In some embodiments, a scaffold sequence of the disclosure comprises or consists of 15, 16, 17, 18, 19, 20, 21, 22, 23, 24, 25, 26, 27, 28, 29 or 30 nucleotides. In some embodiments, the spacer sequence of the disclosure comprises or consists of 20 nucleotides. In some embodiments, the spacer sequence of the disclosure comprises or consists of 21 nucleotides. In some embodiments, a scaffold sequence of the disclosure comprises or consists of between 10 and 100 nucleotides, inclusive of the endpoints. In some embodiments, a scaffold sequence of the disclosure comprises or consists of 30, 35, 40, 45, 50, 55, 60, 65, 70, 76, 80, 87, 90, 95, 100 or any number of nucleotides in between. In some embodiments, the scaffold sequence of the disclosure comprises or consists of between 85 and 95 nucleotides, inclusive of the endpoints. In some embodiments, the scaffold sequence of the disclosure comprises or consists of 85 nucleotides. In some embodiments, the scaffold sequence of the disclosure comprises or consists of 90 nucleotides. In some embodiments, the scaffold sequence of the disclosure comprises or consists of 93 nucleotides.

[0175] In some embodiments of the compositions of the disclosure, a guide RNA or a portion thereof not comprise a nuclear localization sequence (NLS).

[0176] In some embodiments of the compositions of the disclosure, a guide RNA or a portion thereof not comprise a sequence complementary to a protospacer adjacent motif (PAM).

[0177] Therapeutic or pharmaceutical compositions of the disclosure do not comprise a PAMmer oligonucleotide. In other embodiments, optionally, non-therapeutic or non-pharmaceutical compositions may comprise a PAMmer oligonucleotide. The term “PAMmer” refers to an oligonucleotide comprising a PAM sequence that is capable of interacting with a guide nucleotide sequence-programmable RNA binding protein. Non-limiting examples of PAMmers are described in O'Connell et al. Nature 516, pages 263-266 (2014), incorporated herein by reference. A PAM sequence refers to a protospacer adjacent motif comprising about 2 to about 10 nucleotides. PAM sequences are specific to the guide nucleotide sequence-programmable RNA binding protein with which they interact and are known in the art. For example, Streptococcus pyogenes PAM has the sequence 5′-NGG-3′, where “N” is any nucleobase followed by two guanine (“G”) nucleobases. Cas9 of Francisella novicida recognizes the canonical PAM sequence 5′-NGG-3′, but has been engineered to recognize the PAM 5′-YG-3′ (where “Y” is a pyrimidine), thus adding to the range of possible Cas9 targets. The Cpf1 nuclease of Francisella novicida recognizes the PAM 5′-TTTN-3′ or 5′-YTN-3′.

[0178] In some embodiments of the compositions of the disclosure, a guide RNA or a portion thereof comprises a sequence complementary to a protospacer flanking sequence (PFS). In some embodiments, including those wherein a guide RNA or a portion thereof comprises a sequence complementary to a PFS, the first RNA binding protein may comprise a sequence isolated or derived from a Cas13 protein. In some embodiments, including those wherein a guide RNA or a portion thereof comprises a sequence complementary to a PFS, the first RNA binding protein may comprise a sequence encoding a Cas13 protein or an RNA-binding portion thereof. In some embodiments, the guide RNA or a portion thereof does not comprise a sequence complementary to a PFS.

[0179] In some embodiments of the compositions of the disclosure, a guide RNA sequence of the disclosure comprises a promoter to drive expression of the guide RNA. In some embodiments, a vector comprising a guide RNA sequence of the disclosure comprises a promoter to drive expression of the guide RNA. In some embodiments, the promoter is a constitutive promoter. In some embodiments, a promoter is a tissue-specific and/or cell-type specific promoter. In some embodiments, a promoter is an inducible promoter. In some embodiments, a promoter is a hybrid or a recombinant promoter. In some embodiments, a promoter is a promoter capable of driving expression in a mammalian cell. In some embodiments, a promoter is a promoter capable of expression in a human cell. In some embodiments, a promoter is a promoter capable of expressing the guide RNA sequence and restricting the expression to the nucleus of the cell. In some embodiments, a promoter is a human RNA polymerase promoter or a promoter sequence isolated or derived from a a human RNA polymerase promoter. In some embodiments, a promoter is a U6 promoter or a sequence isolated or derived from a sequence encoding a U6 promoter. In some embodiments, a promoter is a human tRNA promoter or a promoter sequence isolated or derived from a sequence a human tRNA promoter. In some embodiments, a promoter is a human valine tRNA promoter or a promoter sequence isolated or derived from a human valine tRNA promoter.

[0180] In some embodiments of the compositions of the disclosure, a promoter further comprises a regulatory element. In some embodiments, a vector comprising a promoter which further comprises a regulatory element. In some embodiments, a regulatory element enhances expression of the guide RNA. Exemplary regulatory elements include, but are not limited to, an enhancer element, an intron, an exon, or a combination thereof.

[0181] In some embodiments of the compositions of the disclosure, a vector of the disclosure comprises one or more of a guide RNA sequence, a promoter to drive expression of the guide RNA and a regulatory element to enhance expression of the guide RNA. In some embodiments of the compositions of the disclosure, the vector further comprises a nucleic acid sequence encoding a fusion protein of the disclosure.

### Fusion Proteins

[0182] Fusion proteins of the disclosure comprise a first RNA binding protein and a second RNA binding protein. In some embodiments, along a sequence encoding the fusion protein, the sequence encoding the first RNA binding protein is positioned 5′ of the sequence encoding the second RNA binding protein. In some embodiments, along a sequence encoding the fusion protein, the sequence encoding the first RNA binding protein is positioned 3′ of the sequence encoding the second RNA binding protein.

[0183] In some embodiments of the compositions of the disclosure, the sequence encoding the first RNA binding protein comprises a sequence isolated or derived from a protein capable of binding an RNA molecule. In some embodiments, the sequence encoding the first RNA binding protein comprises a sequence isolated or derived from a protein capable of selectively binding an RNA molecule and not binding a DNA molecule, a mammalian DNA molecule or any DNA molecule. In some embodiments, the sequence encoding the first RNA binding protein comprises a sequence isolated or derived from a protein capable of binding an RNA molecule and inducing a break in the RNA molecule. In some embodiments, the sequence encoding the first RNA binding protein comprises a sequence isolated or derived from a protein capable of binding an RNA molecule, inducing a break in the RNA molecule, and not binding a DNA molecule, a mammalian DNA molecule or any DNA molecule. In some embodiments, the sequence encoding the first RNA binding protein comprises a sequence isolated or derived from a protein capable of binding an RNA molecule, inducing a break in the RNA molecule, and neither binding nor inducing a break in a DNA molecule, a mammalian DNA molecule or any DNA molecule.

[0184] In some embodiments of the compositions of the disclosure, the sequence encoding the first RNA binding protein comprises a sequence isolated or derived from a protein with no DNA nuclease activity.

[0185] In some embodiments of the compositions of the disclosure, the sequence encoding the first RNA binding protein comprises a sequence isolated or derived from a protein having DNA nuclease activity, wherein the DNA nuclease activity does not induce a break in a DNA molecule, a mammalian DNA molecule or any DNA molecule when a composition of the disclosure is contacted to an RNA molecule or introduced into a cell or into a subject of the disclosure.

[0186] In some embodiments of the compositions of the disclosure, the sequence encoding the first RNA binding protein comprises a sequence isolated or derived from a protein having DNA nuclease activity, wherein the DNA nuclease activity is inactivated and wherein the DNA nuclease activity does not induce a break in a DNA molecule, a mammalian DNA molecule or any DNA molecule when a composition of the disclosure is contacted to an RNA molecule or introduced into a cell or into a subject of the disclosure. In some embodiments, the sequence encoding the first RNA binding protein comprises a mutation that inactivates or decreases the DNA nuclease activity to a level at which the DNA nuclease activity does not induce a break in a DNA molecule, a mammalian DNA molecule or any DNA molecule when a composition of the disclosure is contacted to an RNA molecule or introduced into a cell or into a subject of the disclosure. In some embodiments, the sequence encoding the first RNA binding protein comprises a mutation that inactivates or decreases the DNA nuclease activity and the mutation comprises one or more of a substitution, inversion, transposition, insertion, deletion, or any combination thereof to a nucleic acid sequence or amino acid sequence encoding the first RNA binding protein or a nuclease domain thereof.

[0187] In some embodiments of the compositions of the disclosure, the sequence encoding the first RNA binding protein of an RNA-guided fusion protein disclosed herein comprises a sequence isolated or derived from a CRISPR Cas protein. In some embodiments, the CRISPR Cas protein comprises a Type II CRISPR Cas protein. In some embodiments, the Type II CRISPR Cas protein comprises a Cas9 protein. Exemplary Cas9 proteins of the disclosure may be isolated or derived from any species, including, but not limited to, a bacteria or an archaea. Exemplary Cas9 proteins of the disclosure may be isolated or derived from any species, including, but not limited to, Streptococcus pyogenes, Haloferax mediteranii, Mycobacterium tuberculosis, Francisella tularensis subsp. novicida, Pasteurella multocida, Neisseria meningitidis, Campylobacter jejune, Streptococcus thermophilus, Campylobacter lari CF89-12, Mycoplasma gallisepticum str. F, Nitratifractor salsuginis str. DSM 16511, Parvibaculum lavamentivorans, Roseburia intestinalis, Neisseria cinerea, a Gluconacetobacter diazotrophicus, an Azospirillum B510, a Sphaerochaeta globus str. Buddy, Flavobacterium columnare, Fluviicola taffensis, Bacteroides coprophilus, Mycoplasma mobile, Lactobacillus farciminis, Streptococcus pasteurianus, Lactobacillus johnsonii, Staphylococcus pseudintermedius, Filifactor alocis, Treponema denticola, Legionella pneumophila str. Paris, Sutterella wadsworthensis, Corynebacter diphtherias, Streptococcus aureus, and Francisella novicida.

[0188] Exemplary wild type S. pyogenes Cas9 proteins of the disclosure may comprise or consist of the amino acid sequence:

| (SEQ ID NO: 147) | |
|---|---|
| 1 | MDKKYSIGLD IGTNSVGWAV ITDEYKVPSK KFKVLGNTDR HSIKKNLIGA LLFDSGETAE |
| 61 | ATRLKRTARR RYTRRKNRIC YLQEIFSNEM AKVDDSFFHR LEESFLVEED KKHERHPIFG |
| 121 | NIVDEVAYHE KYPTIYHLRK KLVDSTDKAD LRLIYLALAH MIKFRGHFLI EGDLNPDNSD |
| 181 | VDKLFIQLVQ TYNQLFEENP INASGVDAKA ILSARLSKSR RLENLIAQLP GEKKNGLFGN |
| 241 | LIALSLGLTP NFKSNFDLAE DAKLQLSKDT YDDDLDNLLA QIGDQYADLF LAAKNLSDAI |
| 301 | LLSDILRVNT EITKAPLSAS MIKRYDEHHQ DLTLLKALVR QQLPEKYKEI FFDQSKNGYA |
| 361 | GYIDGGASQE EFYKFIKPIL EKMDGTEELL VKLNREDLLR KQRTFDNGSI PHQIHLGELH |
| 421 | AILRRQEDFY PFLKDNREKI EKILTFRIPY YVGPLARGNS RFAWMTRKSE ETITPWNFEE |
| 481 | VVDKGASAQS FIERMTNFDK NLPNEKVLPK HSLLYEYFTV YNELTKVKYV TEGMRKPAFL |
| 541 | SGEQKKAIVD LLFKTNRKVT VKQLKEDYFK KIECFDSVEI SGVEDRFNAS LGTYHDLLKI |
| 601 | IKDKDFLDNE ENEDILEDIV LTLTLFEDRE MIEERLKTYA HLFDDKVMKQ LKRRRYTGWG |
| 661 | RLSRKLINGI RDKQSGKTIL DFLKSDGFAN RNFMQLIHDD SLTFKEDIQK AQVSGQGDSL |
| 721 | HEHIANLAGS PAIKKGILQT VKVVDELVKV MGRHKPENIV IEMARENQTT QKGQKNSRER |
| 781 | MKRIEEGIKE LGSQILKEHP VENTQLQNEK LYLYYLQNGR DMYVDQELDI NRLSDYDVDH |
| 841 | IVPQSFLKDD SIDNKVLTRS DKNRGKSDNV PSEEVVKKMK NYWRQLLNAK LITQRKFDNL |
| 901 | TKAERGGLSE LDKAGFIKRQ LVETRQITKH VAQILDSRMN TKYDENDKLI REVKVITLKS |
| 961 | KLVSDFRKDF QFYKVREINN YHHAHDAYLN AVVGTALIKK YPKLESEFVY GDYKVYDVRK |
| 1021 | MIAKSEQEIG KATAKYFFYS NIMNFFKTEI TLANGEIRKR PLIETNGETG EIVWDKGRDF |
| 1081 | ATVRKVLSMP QVNIVKKTEV QTGGFSKESI LPKRNSDKLI ARKKDWDPKK YGGFDSPTVA |
| 1141 | YSVLVVAKVE KGKSKKLKSV KELLGITIME RSSFEKNPID FLEAKGYKEV KKDLIIKLPK |
| 1201 | YSLFELENGR KRMLASAGEL QKGNELALPS KYVNFLYLAS HYEKLKGSPE DNEQKQLFVE |
| 1261 | QHKHYLDEII EQISEFSKRV ILADANLDKV LSAYNKHRDK PIREQAENII HLFTLTNLGA |
| 1321 | PAAFKYFDTT IDRKRYTSTK EVLDATLIHQ SITGLYETRI DLSQLGGD. |

[0189] Nuclease inactivated S. pyogenes Cas9 proteins may comprise a substitution of an Alanine (A) for a Aspartic Acid (D) at position 10 and an alanine (A) for a Histidine (H) at position 840. Exemplary nuclease inactivated S. pyogenes Cas9 proteins of the disclosure may comprise or consist of the amino acid sequence (D10A and H840A bolded and underlined):

| (SEQ ID NO: 148) | |
|---|---|
| 1 | MDKKYSIGLA IGTNSVGWAV ITDEYKVPSK KFKVLGNTDR HSIKKNLIGA LLFDSGETAE |
| 61 | ATRLKRTARR RYTRRKNRIC YLQEIFSNEM AKVDDSFFHR LEESFLVEED KKHERHPIFG |
| 121 | NIVDEVAYHE KYPTIYHLRK KLVDSTDKAD LRLIYLALAH MIKFRGHFLI EGDLNPDNSD |
| 181 | VDKLFIQLVQ TYNQLFEENP INASGVDAKA ILSARLSKSR RLENLIAQLP GEKKNGLFGN |
| 241 | LIALSLGLTP NFKSNFDLAE DAKLQLSKDT YDDDLDNLLA QIGDQYADLF LAAKNLSDAI |
| 301 | LLSDILRVNT EITKAPLSAS MIKRYDEHHQ DLTLLKALVR QQLPEKYKEI FFDQSKNGYA |
| 361 | GYIDGGASQE EFYKFIKPIL EKMDGTEELL VKLNREDLLR KQRTFDNGSI PHQIHLGELH |
| 421 | AILRRQEDFY PFLKDNREKI EKILTFRIPY YVGPLARGNS RFAWMTRKSE ETITPWNFEE |
| 481 | VVDKGASAQS FIERMTNFDK NLPNEKVLPK HSLLYEYFTV YNELTKVKYV TEGMRKPAFL |
| 541 | SGEQKKAIVD LLFKTNRKVT VKQLKEDYFK KIECFDSVEI SGVEDRFNAS LGTYHDLLKI |
| 601 | IKDKDFLDNE ENEDILEDIV LTLTLFEDRE MIEERLKTYA HLFDDKVMKQ LKRRRYTGWG |
| 661 | RLSRKLINGI RDKQSGKTIL DFLKSDGFAN RNFMQLIHDD SLTFKEDIQK AQVSGQGDSL |
| 721 | HEHIANLAGS PAIKKGILQT VKVVDELVKV MGRHKPENIV IEMARENQTT QKGQKNSRER |
| 781 | MKRIEEGIKE LGSQILKEHP VENTQLQNEK LYLYYLQNGR DMYVDQELDI NRLSDYDVDA |
| 841 | IVPQSFLKDD SIDNKVLTRS DKNRGKSDNV PSEEVVKKMK NYWRQLLNAK LITQRKFDNL |
| 901 | TKAERGGLSE LDKAGFIKRQ LVETRQITKH VAQILDSRMN TKYDENDKLI REVKVITLKS |
| 961 | KLVSDFRKDF QFYKVREINN YHHAHDAYLN AVVGTALIKK YPKLESEFVY GDYKVYDVRK |
| 1021 | MIAKSEQEIG KATAKYFFYS NIMNFFKTEI TLANGEIRKR PLIETNGETG EIVWDKGRDF |
| 1081 | ATVRKVLSMP QVNIVKKTEV QTGGFSKESI LPKRNSDKLI ARKKDWDPKK YGGFDSPTVA |
| 1141 | YSVLVVAKVE KGKSKKLKSV KELLGITIME RSSFEKNPID FLEAKGYKEV KKDLIIKLPK |
| 1201 | YSLFELENGR KRMLASAGEL QKGNELALPS KYVNFLYLAS HYEKLKGSPE DNEQKQLFVE |
| 1261 | QHKHYLDEII EQISEFSKRV ILADANLDKV LSAYNKHRDK PIREQAENII HLFTLTNLGA |
| 1321 | PAAFKYFDTT IDRKRYTSTK EVLDATLIHQ SITGLYETRI DLSQLGGD. |

[0190] Nuclease inactivated S. pyogenes Cas9 proteins may comprise deletion of a RuvC nuclease domain or a portion thereof, an HNH domain, a DNAse active site, a ββα-metal fold or a portion thereof comprising a DNAse active site or any combination thereof.

[0191] Other exemplary Cas9 proteins or portions thereof may comprise or consist of the following amino acid sequences.

[0192] In some embodiments the Cas9 protein can be S. pyogenes Cas9 and may comprise or consist of the amino acid sequence:

(SEQ ID NO: 149)

MDKKYSIGLDIGTNSVGWAVITDEYKVPSKKFKVLGNTDRHSIKKNLIGA
LLFDSGETAEATRLKRTARRRYTRRKNRICYLQEIFSNEMAKVDDSFFHR
LEESFLVEEDKKHERHPIFGNIVDEVAYHEKYPTIYHLRKKLVDSTDKAD
LRLIYLALAHMIKFRGHFLIEGDLNPDNSDVDKLFIQLVQTYNQLFEENP
INASGVDAKAILSARLSKSRRLENLIAQLPGEKKNGLFGNLIALSLGLTP
NFKSNFDLAEDAKLQLSKDTYDDDLDNLLAQIGDQYADLFLAAKNLSDAI
LLSDILRVNTEITKAPLSASMIKRYDEHHQDLTLLKALVRQQLPEKYKEI
FFDQSKNGYAGYIDGGASQEEFYKFIKPILEKMDGTEELLVKLNREDLLR
KQRTFDNGSIPHQIHLGELHAILRRQEDFYPFLKDNREKIEKILTFRIPY
YVGPLARGNSRFAWMTRKSEETITPWNFEEVVDKGASAQSFIERMTNFDK
NLPNEKVLPKHSLLYEYFTVYNELTKVKYVIEGMRKPAFLSGEQKKAIVD
LLFKTNRKVTVKQLKEDYFKKIECFDSVEISGVEDRFNASLGTYHDLLKI
IKDKDFLDNEENEDILEDIVLTLTLFEDREMIEERLKTYAHLFDDKVMKQ
LKRRRYTGWGRLSRKLINGIRDKQSGKTILDFLKSDGFANRNFMQLIHDD
SLTFKEDIQKAQVSGQGDSLHEHIANLAGSPAIKKGILQTVKVVDELVKV
MGRHKPENIVIEMARENQTTQKGQKNSRERMKRIEEGIKELGSQILKEHP
VENTQLQNEKLYLYYLQNGRDMYVDQELDINRLSDYDVDHIVPQSFLKDD
SIDNKVLTRSDKNRGKSDNVPSEEVVKKMKNYWRQLLNAKLITQRKFDNL
TKAERGGLSELDKAGFIKRQLVETRQITKHVAQILDSRMNTKYDENDKLI
REVKVITLKSKLVSDFRKDFQFYKVREINNYHHAHDAYLNAVVGTALIKK
YPKLESEFVYGDYKVYDVRKMIAKSEQEIGKATAKYFFYSNIMNFFKTEI
TLANGEIRKRPLIETNGETGEIVVVDKGRDFATVRKVLSMPQVNIVKKTE
VQTGGFSKESILPKRNSDKLIARKKDWDPKKYGGFDSPTVAYSVLVVAKV
EKGKSKKLKSVKELLGITIMERSSFEKNPIDFLEAKGYKEVKKDLIIKLP
KYSLFELENGRKRMLASAGELQKGNELALPSKYVNFLYLASHYEKLKGSP
EDNEQKQLFVEQHKHYLDEIIEQISEFSKRVILADANLDKVLSAYNKHRD
KPIREQAENIIHLFTLTNLGAPAAFKYFDTTIDRKRYTSTKEVLDATLIH
QSITGLYETRIDLSQLGGD

[0193] In some embodiments the Cas9 protein can be S. aureus Cas9 and may comprise or consist of the amino acid sequence:

(SEQ ID NO: 150)

MKRNYILGLDIGITSVGYGIIDYETRDVIDAGVRLFKEANVENNEGRRSK
RGARRLKRRRRHRIQRVKKLLFDYNLLTDHSELSGINPYEARVKGLSQKL
SEEEFSAALLHLAKRRGVHNVNEVEEDTGNELSTKEQISRNSKALEEKYV
AELQLERLKKDGEVRGSINRFKTSDYVKEAKQLLKVQKAYHQLDQSFIDT
YIDLLETRRTYYEGPGEGSPFGWKDIKEWYEMLMGHCTYFPEELRSVKYA
YNADLYNALNDLNNLVITRDENEKLEYYEKFQIIENVFKQKKKPTLKQIA
KEILVNEEDIKGYRVTSTGKPEFTNLKVYHDIKDITARKEIIENAELLDQ
IAKILTIYQSSEDIQEELTNLNSELTQEEIEQISNLKGYTGTHNLSLKAI
NLILDELWHTNDNQIAIFNRLKLVPKKVDLSQQKEIPTTLVDDFILSPVV
KRSFIQSIKVINAIIKKYGLPNDIIIELAREKNSKDAQKMINEMQKRNRQ
TNERIEEIIRTTGKENAKYLIEKIKLHDMQEGKCLYSLEAIPLEDLLNNP
FNYEVDHIIPRSVSFDNSFNNKVLVKQEENSKKGNRTPFQYLSSSDSKIS
YETFKKHILNLAKGKGRISKTKKEYLLEERDINRFSVQKDFINRNLVDTR
YATRGLMNLLRSYFRVNNLDVKVKSINGGFTSFLRRKWKFKKERNKGYKH
HAEDALIIANADFIFKEWKKLDKAKKVMENQMFEEKQAESMPEIETEQEY
KEIFITPHQIKHIKDFKDYKYSHRVDKKPNRELINDTLYSTRKDDKGNTL
IVNNLNGLYDKDNDKLKKLINKSPEKLLMYHHDPQTYQKLKLIMEQYGDE
KNPLYKYYEETGNYLTKYSKKDNGPVIKKIKYYGNKLNAHLDITDDYPNS
RNKVVKLSLKPYRFDVYLDNGVYKFVTVKNLDVIKKENYYEVNSKCYEEA
KKLKKISNQAEFIASFYNNDLIKINGELYRVIGVNNDLLNRIEVNMIDIT
YREYLENMNDKRPPRIIKTIASKTQSIKKYSTDILGNLYEVKSKKHPQII
KKG

[0194] In some embodiments the Cas9 protein can be S. thermophiles CRISPR1 Cas9 and may comprise or consist of the amino acid sequence:

(SEQ ID NO: 151)

MSDLVLGLDIGIGSVGVGILNKVTGEIIHKNSRIFPAAQAENNLVRRTNR
QGRRLARRKKHRRVRLNRLFEESGLITDFTKISINLNPYQLRVKGLTDEL
SNEELFIALKNMVKHRGISYLDDASDDGNSSVGDYAQIVKENSKQLETKT
PGQIQLERYQTYGQLRGDFTVEKDGKKHRLINVFPTSAYRSEALRILQTQ
QEFNPQITDEFINRYLEILTGKRKYYHGPGNEKSRTDYGRYRTSGETLDN
IFGILIGKCTFYPDEFRAAKASYTAQEFNLLNDLNNLTVPTETKKLSKEQ
KNQIINYVKNEKAMGPAKLFKYIAKLLSCDVADIKGYRIDKSGKAEIHTF
EAYRKMKTLETLDIEQMDRETLDKLAYVLTLNTEREGIQEALEHEFADGS
FSQKQVDELVQFRKANSSIFGKGWHNFSVKLMMELIPELYETSEEQMTIL
TRLGKQKTTSSSNKTKYIDEKLLTEEIYNPVVAKSVRQAIKIVNAAIKEY
GDFDNIVIEMARETNEDDEKKAIQKIQKANKDEKDAAMLKAANQYNGKAE
LPHSVFHGHKQLATKIRLWHQQGERCLYTGKTISIHDLINNSNQFEVDHI
LPLSITFDDSLANKVLVYATANQEKGQRTPYQALDSMDDAWSFRELKAFV
RESKTLSNKKKEYLLTEEDISKFDVRKKFIERNLVDTRYASRVVLNALQE
HFRAHKIDTKVSVVRGQFTSQLRRHWGIEKTRDTYHHHAVDALIIAASSQ
LNLWKKQKNTLVSYSEDQLLDIETGELISDDEYKESVFKAPYQHFVDTLK
SKEFEDSILFSYQVDSKFNRKISDATIYATRQAKVGKDKADETYVLGKIK
DIYTQDGYDAFMKIYKKDKSKFLMYRHDPQTFEKVIEPILENYPNKQIND
KGKEVPCNPFLKYKEEHGYIRKYSKKGNGPEIKSLKYYDSKLGNHIDITP
KDSNNKVVLQSVSPWRADVYFNKTTGKYEILGLKYADLQFDKGTGTYKIS
QEKYNDIKKKEGVDSDSEFKFTLYKNDLLLVKDTETKEQQLFRFLSRTMP
KQKHYVELKPYDKQKFEGGEALIKVLGNVANSGQCKKGLGKSNISIYKVR
TDVLGNQHIIKNEGDKPKLDF.

[0195] In some embodiments the Cas9 protein can be N meningitidis Cas9 and may comprise or consist of the amino acid sequence:

(SEQ ID NO: 152)

MAAFKPNPINYILGLDIGIASVGWAMVEIDEDENPICLIDLGVRVFERAE
VPKTGDSLAMARRLARSVRRLTRRRAHRLLRARRLLKREGVLQAADFDEN
GLIKSLPNTPWQLRAAALDRKLTPLEWSAVLLHLIKHRGYLSQRKNEGET
ADKELGALLKGVADNAHALQTGDFRTPAELALNKFEKESGHIRNQRGDYS
HTFSRKDLQAELILLFEKQKEFGNPHVSGGLKEGIETLLMTQRPALSGDA
VQKMLGHCTFEPAEPKAAKNTYTAERFIWLTKLNNLRILEQGSERPLTDT
ERATLMDEPYRKSKLTYAQARKLLGLEDTAFFKGLRYGKDNAEASTLMEM
KAYHAISRALEKEGLKDKKSPLNLSPELQDEIGTAFSLFKTDEDITGRLK
DRIQPEILEALLKHISFDKFVQISLKALRRIVPLMEQGKRYDEACAEIYG
DHYGKKNTEEKIYLPPIPADEIRNPVVLRALSQARKVINGVVRRYGSPAR
IHIETAREVGKSFKDRKEIEKRQEENRKDREKAAAKFREYFPNFVGEPKS
KDILKLRLYEQQHGKCLYSGKEINLGRLNEKGYVEIDHALPFSRTWDDSF
NNKVLVLGSENQNKGNQTPYEYFNGKDNSREWQEFKARVETSRFPRSKKQ
RILLQKFDEDGFKERNLNDTRYVNRFLCQFVADRMRLTGKGKKRVFASNG
QITNLLRGFWGLRKVRAENDRHHALDAVVVACSTVAMQQKITRFVRYKEM
NAFDGKTIDKETGEVLHQKTHFPQPWEFFAQEVMIRVFGKPDGKPEFEEA
DTPEKLRTLLAEKLSSRPEAVHEYVTPLFVSRAPNRKMSGQGHMETVKSA
KRLDEGVSVLRVPLTQLKLKDLEKMVNREREPKLYEALKARLEAHKDDPA
KAFAEPFYKYDKAGNRTQQVKAVRVEQVQKTGVVVVRNHNGIADNATMVR
VDVFEKGDKYYLVPIYSWQVAKGILPDRAVVQGKDEEDWQLIDDSFNFKF
SLHPNDLVEVITKKARMFGYFASCHRGTGNINIRIHDLDHKIGKNGILEG
IGVKTALSFQKYQIDELGKEIRPCRLKKRPPVR.

[0196] In some embodiments the Cas9 protein can be Parvibaculum. lavamentivorans Cas9 and may comprise or consist of the amino acid sequence:

(SEQ ID NO: 153)

MERIFGFDIGTTSIGFSVIDYSSTQSAGNIQRLGVRIFPEARDPDGTPLN
QQRRQKRMMRRQLRRRRIRRKALNETLHEAGFLPAYGSADWPVVMADEPY
ELRRRGLEEGLSAYEFGRAIYHLAQHRHFKGRELEESDTPDPDVDDEKEA
ANERAATLKALKNEQTTLGAWLARRPPSDRKRGIHAHRNVVAEEFERLWE
VQSKFHPALKSEEMRARISDTIFAQRPVFWRKNTLGECRFMPGEPLCPKG
SWLSQQRRMLEKLNNLAIAGGNARPLDAEERDAILSKLQQQASMSWPGVR
SALKALYKQRGEPGAEKSLKFNLELGGESKLLGNALEAKLADMFGPDWPA
HPRKQEIRHAVHERLWAADYGETPDKKRVIILSEKDRKAHREAAANSFVA
DFGITGEQAAQLQALKLPTGWEPYSIPALNLFLAELEKGERFGALVNGPD
WEGWRRTNFPHRNQPTGEILDKLPSPASKEERERISQLRNPTVVRTQNEL
RKVVNNLIGLYGKPDRIRIEVGRDVGKSKREREEIQSGIRRNEKQRKKAT
EDLIKNGIANPSRDDVEKWILWKEGQERCPYTGDQIGFNALFREGRYEVE
HIWPRSRSFDNSPRNKTLCRKDVNIEKGNRMPFEAFGHDEDRWSAIQIRL
QGMVSAKGGTGMSPGKVKRFLAKTMPEDFAARQLNDTRYAAKQILAQLKR
LWPDMGPEAPVKVEAVTGQVTAQLRKLWTLNNILADDGEKTRADHRHHAI
DALTVACTHPGMTNKLSRYWQLRDDPRAEKPALTPPWDTIRADAEKAVSE
IVVSHRVRKKVSGPLHKETTYGDTGTDIKTKSGTYRQFVTRKKIESLSKG
ELDEIRDPRIKEIVAAHVAGRGGDPKKAFPPYPCVSPGGPEIRKVRLTSK
QQLNLMAQTGNGYADLGSNHHIAIYRLPDGKADFEIVSLFDASRRLAQRN
PIVQRTRADGASFVMSLAAGEAIMIPEGSKKGIWIVQGVVVASGQVVLER
DTDADHSTTTRPMPNPILKDDAKKVSIDPIGRVRPSND.

[0197] In some embodiments the Cas9 protein can be Corynebacter diphtheria Cas9 and may comprise or consist of the amino acid sequence:

(SEQ ID NO: 154)

MKYHVGIDVGTFSVGLAAIEVDDAGMPIKTLSLVSHIHDSGLDPDEIKSA
VTRLASSGIARRTRRLYRRKRRRLQQLDKFIQRQGWPVIELEDYSDPLYP
WKVRAELAASYIADEKERGEKLSVALRHIARHRGWRNPYAKVSSLYLPDG
PSDAFKAIREEIKRASGQPVPETATVGQMVTLCELGTLKLRGEGGVLSAR
LQQSDYAREIQEICRMQEIGQELYRKIIDVVFAAESPKGSASSRVGKDPL
QPGKNRALKASDAFQRYRIAALIGNLRVRVDGEKRILSVEEKNLVFDHLV
NLTPKKEPEWVTIAEILGIDRGQLIGTATMTDDGERAGARPPTHDTNRSI
VNSRIAPLVDWWKTASALEQHAMVKALSNAEVDDFDSPEGAKVQAFFADL
DDDVHAKLDSLHLPVGRAAYSEDTLVRLTRRMLSDGVDLYTARLQEFGIE
PSWTPPTPRIGEPVGNPAVDRVLKTVSRWLESATKTWGAPERVIIEHVRE
GFVTEKRAREMDGDMRRRAARNAKLFQEMQEKLNVQGKPSRADLWRYQSV
QRQNCQCAYCGSPITFSNSEMDHIVPRAGQGSTNTRENLVAVCHRCNQSK
GNTPFAIWAKNTSIEGVSVKEAVERTRHWVTDTGMRSTDFKKFTKAVVER
FQRATMDEEIDARSMESVAWMANELRSRVAQHFASHGTTVRVYRGSLTAE
ARRASGISGKLKFFDGVGKSRLDRRHHAIDAAVIAFTSDYVAETLAVRSN
LKQSQAHRQEAPQWREFTGKDAEHRAAWRVWCQKMEKLSALLTEDLRDDR
VVVMSNVRLRLGNGSAHKETIGKLSKVKLSSQLSVSDIDKASSEALWCAL
TREPGFDPKEGLPANPERHIRVNGTHVYAGDNIGLFPVSAGSIALRGGYA
ELGSSFHHARVYKITSGKKPAFAMLRVYTIDLLPYRNQDLFSVELKPQTM
SMRQAEKKLRDALATGNAEYLGWLVVDDELVVDTSKIATDQVKAVEAELG
TIRRWRVDGFFSPSKLRLRPLQMSKEGIKKESAPELSKIIDRPGWLPAVN
KLFSDGNVTVVRRDSLGRVRLESTAHLPVTWKVQ.

[0198] In some embodiments the Cas9 protein can be Streptococcus pasteurianus Cas9 and may comprise or consist of the amino acid sequence:

(SEQ ID NO: 155)

MTNGKILGLDIGIASVGVGIIEAKTGKVVHANSRLFSAANAENNAERRGF
RGSRRLNRRKKHRVKRVRDLFEKYGIVTDFRNLNLNPYELRVKGLTEQLK
NEELFAALRTISKRRGISYLDDAEDDSTGSTDYAKSIDENRRLLKNKTPG
QIQLERLEKYGQLRGNFTVYDENGEAHRLINVFSTSDYEKEARKILETQA
DYNKKITAEFIDDYVEILTQKRKYYHGPGNEKSRTDYGRFRTDGTTLENI
FGILIGKCNFYPDEYRASKASYTAQEYNFLNDLNNLKVSTETGKLSTEQK
ESLVEFAKNTATLGPAKLLKEIAKILDCKVDEIKGYREDDKGKPDLHTFE
PYRKLKFNLESINIDDLSREVIDKLADILTLNIIREGIEDAIKRNLPNQF
TEEQISEIIKVRKSQSTAFNKGWHSFSAKLMNELIPELYATSDEQMTILT
RLEKFKVNKKSSKNTKTIDEKEVTDEIYNPVVAKSVRQTIKIINAAVKKY
GDFDKIVIEMPRDKNADDEKKFIDKRNKENKKEKDDALKRAAYLYNSSDK
LPDEVFHGNKQLETKIRLWYQQGERCLYSGKPISIQELVHNSNNFEIDHI
LPLSLSFDDSLANKVLVYAWTNQEKGQKTPYQVIDSMDAAWSFREMKDYV
LKQKGLGKKKRDYLLTTENIDKIEVKKKFIERNLVDTRYASRVVLNSLQS
ALRELGKDTKVSVVRGQFTSQLRRKWKIDKSRETYHHHAVDALIIAASSQ
LKLWEKQDNPMFVDYGKNQVVDKQTGEILSVSDDEYKELVFQPPYQGFVN
TISSKGFEDEILFSYQVDSKYNRKVSDATIYSTRKAKIGKDKKEETYVLG
KIKDIYSQNGFDTFIKKYNKDKTQFLMYQKDSLTWENVIEVILRDYPTTK
KSEDGKNDVKCNPFEEYRRENGLICKYSKKGKGTPIKSLKYYDKKLGNCI
DITPEESRNKVILQSINPWRADVYFNPETLKYELMGLKYSDLSFEKGTGN
YHISQEKYDAIKEKEGIGKKSEFKFTLYRNDLILIKDIASGEQEIYRFLS
RTMPNVNHYVELKPYDKEKFDNVQELVEALGEADKVGRCIKGLNKPNISI
YKVRTDVLGNKYFVKKKGDKPKLDFKNNKK.

[0199] In some embodiments the Cas9 protein can be Neisseria cinerea Cas9 and may comprise or consist of the amino acid sequence:

(SEQ ID NO: 156)

MAAFKPNPMNYILGLDIGIASVGWAIVEIDEEENPIRLIDLGVRVFERAE
VPKTGDSLAAARRLARSVRRLTRRRAHRLLRARRLLKREGVLQAADFDEN
GLIKSLPNTPWQLRAAALDRKLTPLEWSAVLLHLIKHRGYLSQRKNEGET
ADKELGALLKGVADNTHALQTGDFRTPAELALNKFEKESGHIRNQRGDYS
HTFNRKDLQAELNLLFEKQKEFGNPHVSDGLKEGIETLLMTQRPALSGDA
VQKMLGHCTFEPTEPKAAKNTYTAERFVWLTKLNNLRILEQGSERPLTDT
ERATLMDEPYRKSKLTYAQARKLLDLDDTAFFKGLRYGKDNAEASTLMEM
KAYHAISRALEKEGLKDKKSPLNLSPELQDEIGTAFSLFKTDEDITGRLK
DRVQPEILEALLKHISFDKFVQISLKALRRIVPLMEQGNRYDEACTEIYG
DHYGKKNIEEKIYLPPIPADEIRNPVVLRALSQARKVINGVVRRYGSPAR
IHIETAREVGKSFKDRKEIEKRQEENRKDREKSAAKFREYFPNFVGEPKS
KDILKLRLYEQQHGKCLYSGKEINLGRLNEKGYVEIDHALPFSRTWDDSF
NNKVLALGSENQNKGNQTPYEYFNGKDNSREWQEFKARVETSRFPRSKKQ
RILLQKFDEDGFKERNLNDTRYINRFLCQFVADHMLLTGKGKRRVFASNG
QITNLLRGFWGLRKVRAENDRHHALDAVVVACSTIAMQQKITRFVRYKEM
NAFDGKTIDKETGEVLHQKAHFPQPWEFFAQEVMIRVFGKPDGKPEFEEA
DTPEKLRTLLAEKLSSRPEAVHKYVTPLFISRAPNRKMSGQGHMETVKSA
KRLDEGISVLRVPLTQLKLKDLEKMVNREREPKLYEALKARLEAHKDDPA
KAFAEPFYKYDKAGNRTQQVKAVRVEQVQKTGVWVHNHNGIADNATIVRV
DVFEKGGKYYLVPIYSWQVAKGILPDRAVVQGKDEEDWTVMDDSFEFKFV
LYANDLIKLTAKKNEFLGYFVSLNRATGAIDIRTHDTDSTKGKNGIFQSV
GVKTALSFQKYQIDELGKEIRPCRLKKRPPVR.

[0200] In some embodiments the Cas9 protein can be Campylobacter lari Cas9 and may comprise or consist of the amino acid sequence:

(SEQ ID NO: 157)

MRILGFDIGINSIGWAFVENDELKDCGVRIFTKAENPKNKESLALPRRNA
RSSRRRLKRRKARLIAIKRILAKELKLNYKDYVAADGELPKAYEGSLASV
YELRYKALTQNLETKDLARVILHIAKHRGYMNKNEKKSNDAKKGKILSAL
KNNALKLENYQSVGEYFYKEFFQKYKKNTKNFIKIRNTKDNYNNCVLSSD
LEKELKLILEKQKEFGYNYSEDFINEILKVAFFQRPLKDFSHLVGACTFF
EEEKRACKNSYSAWEFVALTKIINEIKSLEKISGEIVPTQTINEVLNLIL
DKGSITYKKFRSCINLHESISFKSLKYDKENAENAKLIDFRKLVEFKKAL
GVHSLSRQELDQISTHITLIKDNVKLKTVLEKYNLSNEQINNLLEIEFND
YINLSFKALGMILPLMREGKRYDEACEIANLKPKTVDEKKDFLPAFCDSI
FAHELSNPVVNRAISEYRKVLNALLKKYGKVHKIHLELARDVGLSKKARE
KIEKEQKENQAVNAWALKECENIGLKASAKNILKLKLWKEQKEICIYSGN
KISIEHLKDEKALEVDHIYPYSRSFDDSFINKVLVFTKENQEKLNKTPFE
AFGKNIEKWSKIQTLAQNLPYKKKNKILDENFKDKQQEDFISRNLNDTRY
IATLIAKYTKEYLNFLLLSENENANLKSGEKGSKIHVQTISGMLTSVLRH
TWGFDKKDRNNHLHHALDAIIVAYSTNSIIKAFSDFRKNQELLKARFYAK
ELTSDNYKHQVKFFEPFKSFREKILSKIDEIFVSKPPRKRARRALHKDTF
HSENKIIDKCSYNSKEGLQIALSCGRVRKIGTKYVENDTIVRVDIFKKQN
KFYAIPIYAMDFALGILPNKIVITGKDKNNNPKQWQTIDESYEFCFSLYK
NDLILLQKKNMQEPEFAYYNDFSISTSSICVEKHDNKFENLTSNQKLLFS
NAKEGSVKVESLGIQNLKVFEKYIITPLGDKIKADFQPRENISLKTSKKY
GLR.

[0201] In some embodiments the Cas9 protein can be T denticola Cas 9 and may comprise or consist of the amino acid sequence:

(SEQ ID NO: 158)

MKKEIKDYFLGLDVGTGSVGWAVTDTDYKLLKANRKDLWGMRCFETAETA
EVRRLHRGARRRIERRKKRIKLLQELFSQEIAKTDEGFFQRMKESPFYAE
DKTILQENTLFNDKDFADKTYHKAYPTINHLIKAWIENKVKPDPRLLYLA
CHNIIKKRGHFLFEGDFDSENQFDTSIQALFEYLREDMEVDIDADSQKVK
EILKDSSLKNSEKQSRLNKILGLKPSDKQKKAITNLISGNKINFADLYDN
PDLKDAEKNSISFSKDDFDALSDDLASILGDSFELLLKAKAVYNCSVLSK
VIGDEQYLSFAKVKIYEKHKTDLTKLKNVIKKHFPKDYKKVFGYNKNEKN
NNNYSGYVGVCKTKSKKLIINNSVNQEDFYKFLKTILSAKSEIKEVNDIL
TEIETGTFLPKQISKSNAEIPYQLRKMELEKILSNAEKHFSFLKQKDEKG
LSHSEKIIMLLTFKIPYYIGPINDNHKKFFPDRCWVVKKEKSPSGKTTPW
NFFDHIDKEKTAEAFITSRTNFCTYLVGESVLPKSSLLYSEYTVLNEINN
LQIIIDGKNICDIKLKQKIYEDLFKKYKKITQKQISTFIKHEGICNKTDE
VIILGIDKECTSSLKSYIELKNIFGKQVDEISTKNMLEEIIRWATIYDEG
EGKTILKTKIKAEYGKYCSDEQIKKILNLKFSGWGRLSRKFLETVTSEMP
GFSEPVNIITAMRETQNNLMELLSSEFTFTENIKKINSGFEDAEKQFSYD
GLVKPLFLSPSVKKMLWQTLKLVKEISHITQAPPKKIFIEMAKGAELEPA
RTKTRLKILQDLYNNCKNDADAFSSEIKDLSGKIENEDNLRLRSDKLYLY
YTQLGKCMYCGKPIEIGHVFDTSNYDIDHIYPQSKIKDDSISNRVLVCSS
CNKNKEDKYPLKSEIQSKQRGFWNFLQRNNFISLEKLNRLTRATPISDDE
TAKFIARQLVETRQATKVAAKVLEKMFPETKIVYSKAETVSMFRNKFDIV
KCREINDFHHAHDAYLNIVVGNVYNTKFTNNPWNFIKEKRDNPKIADTYN
YYKVFDYDVKRNNITAWEKGKTIITVKDMLKRNTPIYTRQAACKKGELFN
QTIMKKGLGQHPLKKEGPFSNISKYGGYNKVSAAYYTLIEYEEKGNKIRS
LETIPLYLVKDIQKDQDVLKSYLTDLLGKKEFKILVPKIKINSLLKINGF
PCHITGKTNDSFLLRPAVQFCCSNNEVLYFKKIIRFSEIRSQREKIGKTI
SPYEDLSFRSYIKENLWKKTKNDEIGEKEFYDLLQKKNLEIYDMLLTKHK
DTIYKKRPNSATIDILVKGKEKFKSLIIENQFEVILEILKLFSATRNVSD
LQHIGGSKYSGVAKIGNKISSLDNCILIYQSITGIFEKRIDLLKV.

[0202] In some embodiments the Cas9 protein can be S. mutans Cas9 and may comprise or consist of the amino acid sequence:

(SEQ ID NO: 159)

MKKPYSIGLDIGTNSVGWAVVTDDYKVPAKKMKVLGNTDKSHIEKNLLGA
LLFDSGNTAEDRRLKRTARRRYTRRRNRILYLQEIFSEEMGKVDDSFFHR
LEDSFLVIEDKRGERHPIFGNLEEEVKYHENFPTIYHLRQYLADNPEKVD
LRLVYLALAHIIKFRGHFLIEGKFDTRNNDVQRLFQEFLAVYDNTFENSS
LQEQNVQVEEILTDKISKSAKKDRVLKLFPNEKSNGRFAEFLKLIVGNQA
DFKKHFELEEKAPLQFSKDTYEEELEVLLAQIGDNYAELFLSAKKLYDSI
LLSGILTVTDVGTKAPLSASMIQRYNEHQMDLAQLKQFIRQKLSDKYNEV
FSDVSKDGYAGYIDGKTNQEAFYKYLKGLLNKIEGSGYFLDKIEREDFLR
KQRTFDNGSIPHQIHLQEMRAIIRRQAEFYPFLADNQDRIEKLLTFRIPY
YVGPLARGKSDFAWLSRKSADKITPWNFDEIVDKESSAEAFINRMTNYDL
YLPNQKVLPKHSLLYEKFTVYNELTKVKYKTEQGKTAFFDANMKQEIFDG
VFKVYRKVTKDKLMDFLEKEFDEFRIVDLTGLDKENKVFNASYGTYHDLC
KILDKDFLDNSKNEKILEDIVLTLTLFEDREMIRKRLENYSDLLTKEQVK
KLERRHYTGWGRLSAELIHGIRNKESRKTILDYLIDDGNSNRNFMQLIND
DALSFKEEIAKAQVIGETDNLNQVVSDIAGSPAIKKGILQSLKIVDELVK
IMGHQPENIVVEMARENQFTNQGRRNSQQRLKGLTDSIKEFGSQILKEHP
VENSQLQNDRLFLYYLQNGRDMYTGEELDIDYLSQYDIDHIIPQAFIKDN
SIDNRVLTSSKENRGKSDDVPSKDVVRKMKSYWSKLLSAKLITQRKFDNL
TKAERGGLTDDDKAGFIKRQLVETRQITKHVARILDERFNTETDENNKKI
RQVKIVTLKSNLVSNFRKEFELYKVREINDYHHAHDAYLNAVIGKALLGV
YPQLEPEFVYGDYPHFHGHKENKATAKKFFYSNIMNFFKKDDVRTDKNGE
IIWKKDEHISNIKKVLSYPQVNIVKKVEEQTGGFSKESILPKGNSDKLIP
RKTKKFYWDTKKYGGFDSPIVAYSILVIADIEKGKSKKLKTVKALVGVTI
MEKMTFERDPVAFLERKGYRNVQEENIIKLPKYSLFKLENGRKRLLASAR
ELQKGNEIVLPNHLGTLLYHAKNIHKVDEPKHLDYVDKHKDEFKELLDVV
SNFSKKYTLAEGNLEKIKELYAQNNGEDLKELASSFINLLTFTAIGAPAT
FKFFDKNIDRKRYTSTTEILNATLIHQSITGLYETRIDLNKLGGD

[0203] In some embodiments the Cas9 protein can be S. thermophilus CRISPR 3 Cas9 and may comprise or consist of the amino acid sequence:

(SEQ ID NO: 160)

MTKPYSIGLDIGTNSVGWAVTTDNYKVPSKKMKVLGNTSKKYIKKNLLGV
LLFDSGITAEGRRLKRTARRRYTRRRNRILYLQEIFSTEMATLDDAFFQR
LDDSFLVPDDKRDSKYPIFGNLVEEKAYHDEFPTIYHLRKYLADSTKKAD
LRLVYLALAHMIKYRGHFLIEGEFNSKNNDIQKNFQDFLDTYNAIFESDL
SLENSKQLEEIVKDKISKLEKKDRILKLFPGEKNSGIFSEFLKLIVGNQA
DFRKCFNLDEKASLHFSKESYDEDLETLLGYIGDDYSDVFLKAKKLYDAI
LLSGFLTVTDNETEAPLSSAMIKRYNEHKEDLALLKEYIRNISLKTYNEV
FKDDTKNGYAGYIDGKTNQEDFYVYLKKLLAEFEGADYFLEKIDREDFLR
KQRTFDNGSIPYQIHLQEMRAILDKQAKFYPFLAKNKERIEKILTFRIPY
YVGPLARGNSDFAWSIRKRNEKITPWNFEDVIDKESSAEAFINRMTSFDL
YLPEEKVLPKHSLLYETFNVYNELTKVRFIAESMRDYQFLDSKQKKDIVR
LYFKDKRKVTDKDIIEYLHAIYGYDGIELKGIEKQFNSSLSTYHDLLNII
NDKEFLDDSSNEAIIEEIIHTLTIFEDREMIKQRLSKFENIFDKSVLKKL
SRRHYTGWGKLSAKLINGIRDEKSGNTILDYLIDDGISNRNFMQLIHDDA
LSFKKKIQKAQIIGDEDKGNIKEVVKSLPGSPAIKKGILQSIKIVDELVK
VMGGRKPESIVVEMARENQYTNQGKSNSQQRLKRLEKSLKELGSKILKEN
IPAKLSKIDNNALQNDRLYLYYLQNGKDMYTGDDLDIDRLSNYDIDHIIP
QAFLKDNSIDNKVLVSSASNRGKSDDVPSLEVVKKRKTFWYQLLKSKLIS
QRKFDNLTKAERGGLSPEDKAGFIQRQLVETRQITKHVARLLDEKFNNKK
DENNRAVRTVKIITLKSTLVSQFRKDFELYKVREINDFHHAHDAYLNAVV
ASALLKKYPKLEPEFVYGDYPKYNSFRERKSATEKVYFYSNIMNIFKKSI
SLADGRVIERPLIEVNEETGESVWNKESDLATVRRVLSYPQVNVVKKVEE
QNHGLDRGKPKGLFNANLSSKPKPNSNENLVGAKEYLDPKKYGGYAGISN
SFTVLVKGTIEKGAKKKITNVLEFQGISILDRINYRKDKLNFLLEKGYKD
IELIIELPKYSLFELSDGSRRMLASILSTNNKRGEIHKGNQIFLSQKFVK
LLYHAKRISNTINENHRKYVENHKKEFEELFYYILEFNENYVGAKKNGKL
LNSAFQSWQNHSIDELCSSFIGPTGSERKGLFELTSRGSAADFEFLGVKI
PRYRDYTPSSLLKDATLIHQSVTGLYETRIDLAKLGEG

[0204] In some embodiments the Cas9 protein can be C. jejuni Cas9 and may comprise or consist of the amino acid sequence:

(SEQ ID NO: 161)

MARILAFDIGISSIGWAFSENDELKDCGVRIFTKVENPKTGESLALPRRL
ARSARKRLARRKARLNHLKHLIANEFKLNYEDYQSFDESLAKAYKGSLIS
PYELRFRALNELLSKQDFARVILHIAKRRGYDDIKNSDDKEKGAILKAIK
QNEEKLANYQSVGEYLYKEYFQKFKENSKEFTNVRNKKESYERCIAQSFL
KDELKLIFKKQREFGFSFSKKFEEEVLSVAFYKRALKDFSHLVGNCSFFT
DEKRAPKNSPLAFWVALTRIINLLNNLKNTEGILYTKDDLNALLNEVLKN
GTLTYKQTKKLLGLSDDYEFKGEKGTYFIEFKKYKEFIKALGEHNLSQDD
LNEIAKDITLIKDEIKLKKALAKYDLNQNQIDSLSKLEFKDHLNISFKAL
KLVTPLMLEGKKYDEACNELNLKVAINEDKKDFLPAFNETYYKDEVTNPV
VLRAIKEYRKVLNALLKKYGKVHKINIELAREVGKNHSQRAKIEKEQNEN
YKAKKDAELECEKLGLKINSKNILKLRLFKEQKEFCAYSGEKIKISDLQD
EKMLEIDHIYPYSRSFDDSYMNKVLVFTKQNQEKLNQTPFEAFGNDSAKW
QKIEVLAKNLPTKKQKRILDKNYKDKEQKNFKDRNLNDTRYIARLVLNYT
KDYLDFLPLSDDENTKLNDTQKGSKVHVEAKSGMLTSALRHTWGFSAKDR
NNHLHHAIDAVIIAYANNSIVKAFSDFKKEQESNSAELYAKKISELDYKN
KRKFFEPFSGFRQKVLDKIDEIFVSKPERKKPSGALHEETFRKEEEFYQS
YGGKEGVLKALELGKIRKVNGKIVKNGDMFRVDIFKHKKTNKFYAVPIYT
MDFALKVLPNKAVARSKKGEIKDWILMDENYEFCFSLYKDSLILIQTKDM
QEPEFVYYNAFTSSTVSLIVSKHDNKFETLSKNQKILFKNANEKEVIAKS
IGIQNLKVFEKYIVSALGEVTKAEFRQREDFKK

[0205] In some embodiments the Cas9 protein can be P. multocida Cas9 and may comprise or consist of the amino acid sequence:

(SEQ ID NO: 162)

MQTTNLSYILGLDLGIASVGWAVVEINENEDPIGLIDVGVRIFERAEVPK
TGESLALSRRLARSTRRLIRRRAHRLLLAKRFLKREGILSTIDLEKGLPN
QAWELRVAGLERRLSAIEWGAVLLHLIKHRGYLSKRKNESQTNNKELGAL
LSGVAQNHQLLQSDDYRTPAELALKKFAKEEGHIRNQRGAYTHTFNRLDL
LAELNLLFAQQHQFGNPHCKEHIQQYMTELLMWQKPALSGEAILKMLGKC
THEKNEFKAAKHTYSAERFVWLTKLNNLRILEDGAERALNEEERQLLINH
PYEKSKLTYAQVRKLLGLSEQAIFKHLRYSKENAESATFMELKAWHAIRK
ALENQGLKDTWQDLAKKPDLLDEIGTAFSLYKTDEDIQQYLTNKVPNSVI
NALLVSLNFDKFIELSLKSLRKILPLMEQGKRYDQACREIYGHHYGEANQ
KTSQLLPAIPAQEIRNPVVLRTLSQARKVINAIIRQYGSPARVHIETGRE
LGKSFKERREIQKQQEDNRTKRESAVQKFKELFSDFSSEPKSKDILKFRL
YEQQHGKCLYSGKEINIHRLNEKGYVEIDHALPFSRTWDDSFNNKVLVLA
SENQNKGNQTPYEWLQGKINSERWKNFVALVLGSQCSAAKKQRLLTQVID
DNKFIDRNLNDTRYIARFLSNYIQENLLLVGKNKKNVFTPNGQITALLRS
RWGLIKARENNNRHHALDAIVVACATPSMQQKITRFIRFKEVHPYKIENR
YEMVDQESGEIISPHFPEPWAYFRQEVNIRVFDNHPDTVLKEMLPDRPQA
NHQFVQPLFVSRAPTRKMSGQGHMETIKSAKRLAEGISVLRIPLTQLKPN
LLENMVNKEREPALYAGLKARLAEFNQDPAKAFATPFYKQGGQQVKAIRV
EQVQKSGVLVRENNGVADNASIVRTDVFIKNNKFFLVPIYTWQVAKGILP
NKAIVAHKNEDEWEEMDEGAKFKFSLFPNDLVELKTKKEYFFGYYIGLDR
ATGNISLKEHDGEISKGKDGVYRVGVKLALSFEKYQVDELGKNRQICRPQ
QRQPVR

[0206] In some embodiments the Cas9 protein can be F. novicida Cas9 and may comprise or consist of the amino acid sequence:

(SEQ ID NO: 163)

MNFKILPIAIDLGVKNTGVFSAFYQKGTSLERLDNKNGKVYELSKDSYTL
LMNNRTARRHQRRGIDRKQLVKRLFKLIWTEQLNLEWDKDTQQAISFLFN
RRGFSFITDGYSPEYLNIVPEQVKAILMDIFDDYNGEDDLDSYLKLATEQ
ESKISEIYNKLMQKILEFKLMKLCTDIKDDKVSTKTLKEITSYEFELLAD
YLANYSESLKTQKFSYTDKQGNLKELSYYHHDKYNIQEFLKRHATINDRI
LDTLLTDDLDIWNFNFEKFDFDKNEEKLQNQEDKDHIQAHLHHFVFAVNK
IKSEMASGGRHRSQYFQEITNVLDENNHQEGYLKNFCENLHNKKYSNLSV
KNLVNLIGNLSNLELKPLRKYFNDKIHAKADHWDEQKFIETYCHWILGEW
RVGVKDQDKKDGAKYSYKDLCNELKQKVTKAGLVDFLLELDPCRTIPPYL
DNNNRKPPKCQSLILNPKFLDNQYPNWQQYLQELKKLQSIQNYLDSFETD
LKVLKSSKDQPYFVEYKSSNQQIASGQRDYKDLDARILQFIFDRVKASDE
LLLNEIYFQAKKLKQKASSELEKLESSKKLDEVIANSQLSQILKSQHTNG
IFEQGTFLHLVCKYYKQRQRARDSRLYIMPEYRYDKKLHKYNNTGRFDDD
NQLLTYCNHKPRQKRYQLLNDLAGVLQVSPNFLKDKIGSDDDLFISKWLV
EHIRGFKKACEDSLKIQKDNRGLLNHKINIARNTKGKCEKEIFNLICKIE
GSEDKKGNYKHGLAYELGVLLFGEPNEASKPEFDRKIKKFNSIYSFAQIQ
QIAFAERKGNANTCAVCSADNAHRMQQIKIIEPVEDNKDKIILSAKAQRL
PAIPTRIVDGAVKKMATILAKNIVDDNWQNIKQVLSAKHQLHIPIIIESN
AFEFEPALADVKGKSLKDRRKKALERISPENIFKDKNNRIKEFAKGISAY
SGANLTDGDFDGAKEELDHIIPRSHKKYGTLNDEANLICVTRGDNKNKGN
RIFCLRDLADNYKLKQFETTDDLEIEKKIADTIWDANKKDFKFGNYRSFI
NLTPQEQKAFRHALFLADENPIKQAVIRAINNRNRTFVNGTQRYFAEVLA
NNIYLRAKKENLNTDKISFDYFGIPTIGNGRGIAEIRQLYEKVDSDIQAY
AKGDKPQASYSHLIDAMLAFCIAADEHRNDGSIGLEIDKNYSLYPLDKNT
GEVFTKDIFSQIKITDNEFSDKKLVRKKAIEGFNTHRQMTRDGIYAENYL
PILIHKELNEVRKGYTWKNSEEIKIFKGKKYDIQQLNNLVYCLKFVDKPI
SIDIQISTLEELRNILTTNNIAATAEYYYINLKTQKLHEYYIENYNTALG
YKKYSKEMEFLRSLAYRSERVKIKSIDDVKQVLDKDSNFIIGKITLPFKK
EWQRLYREWQNTTIKDDYEFLKSFFNVKSITKLHKKVRKDFSLPISTNEG
KFLVKRKTWDNNFIYQILNDSDSRADGTKPFIPAFDISKNEIVEAIIDSF
TSKNIFWLPKNIELQKVDNKNIFAIDTSKWFEVETPSDLRDIGIATIQYK
IDNNSRPKVRVKLDYVIDDDSKINYFMNHSLLKSRYPDKVLEILKQSTII
EFESSGFNKTIKEMLGMKLAGIYNETSNN

[0207] In some embodiments the Cas9 protein can be Lactobacillus buchneri Cas9 and may comprise or consist of the amino acid sequence:

(SEQ ID NO: 164)

MKVNNYHIGLDIGTSSIGWVAIGKDGKPLRVKGKTAIGARLFQEGNPAAD
RRMFRTTRRRLSRRKWRLKLLEEIFDPYITPVDSTFFARLKQSNLSPKDS
RKEFKGSMLFPDLTDMQYHKNYPTIYHLRHALMTQDKKFDIRMVYLAIHH
IVKYRGNFLNSTPVDSFKASKVDFVDQFKKLNELYAAINPEESFKINLAN
SEDIGHQFLDPSIRKFDKKKQIPKIVPVMMNDKVTDRLNGKIASEIIHAI
LGYKAKLDVVLQCTPVDSKPWALKFDDEDIDAKLEKILPEMDENQQSIVA
ILQNLYSQVTLNQIVPNGMSLSESMIEKYNDHHDHLKLYKKLIDQLADPK
KKAVLKKAYSQYVGDDGKVIEQAEFWSSVKKNLDDSELSKQIMDLIDAEK
FMPKQRTSQNGVIPHQLHQRELDEIIEHQSKYYPWLVEINPNKHDLHLAK
YKIEQLVAFRVPYYVGPMITPKDQAESAETVFSWMERKGTETGQITPWNF
DEKVDRKASANRFIKRMTTKDTYLIGEDVLPDESLLYEKFKVLNELNMVR
VNGKLLKVADKQAIFQDLFENYKHVSVKKLQNYIKAKTGLPSDPEISGLS
DPEHFNNSLGTYNDFKKLFGSKVDEPDLQDDFEKIVEWSTVFEDKKILRE
KLNEITWLSDQQKDVLESSRYQGWGRLSKKLLTGIVNDQGERIIDKLWNT
NKNFMQIQSDDDFAKRIHEANADQMQAVDVEDVLADAYTSPQNKKAIRQV
VKVVDDIQKAMGGVAPKYISIEFTRSEDRNPRRTISRQRQLENTLKDTAK
SLAKSINPELLSELDNAAKSKKGLTDRLYLYFTQLGKDIYTGEPINIDEL
NKYDIDHILPQAFIKDNSLDNRVLVLTAVNNGKSDNVPLRMFGAKMGHFW
KQLAEAGLISKRKLKNLQTDPDTISKYAMHGFIRRQLVETSQVIKLVANI
LGDKYRNDDTKIIEITARMNHQMRDEFGFIKNREINDYHHAFDAYLTAFL
GRYLYHRYIKLRPYFVYGDFKKFREDKVTMRNFNFLHDLTDDTQEKIADA
ETGEVIWDRENSIQQLKDVYHYKFMLISHEVYTLRGAMFNQTVYPASDAG
KRKLIPVKADRPVNVYGGYSGSADAYMAIVRIHNKKGDKYRVVGVPMRAL
DRLDAAKNVSDADFDRALKDVLAPQLTKTKKSRKTGEITQVIEDFEIVLG
KVMYRQLMIDGDKKFMLGSSTYQYNAKQLVLSDQSVKTLASKGRLDPLQE
SMDYNNVYlEILDKVNQYFSLYDMNKFRHKLNLGFSKFISFPNHNVLDGN
TKVSSGKREILQEILNGLHANPTFGNLKDVGITTPFGQLQQPNGILLSDE
TKIRYQSPTGLFERTVSLKDL

[0208] In some embodiments the Cas9 protein can be Listeria innocua Cas9 and may comprise or consist of the amino acid sequence:

(SEQ ID NO: 165)

MKKPYTIGLDIGTNSVGWAVLTDQYDLVKRKMKIAGDSEKKQIKKNFWGV
RLFDEGQTAADRRMARTARRRIERRRNRISYLQGIFAEEMSKTDANFFCR
LSDSFYVDNEKRNSRHPFFATIEEEVEYHKNYPTIYHLREELVNSSEKAD
LRLVYLALAHIIKYRGNFLIEGALDTQNTSVDGIYKQFIQTYNQVFASGI
EDGSLKKLEDNKDVAKILVEKVTRKEKLERILKLYPGEKSAGMFAQFISL
IVGSKGNFQKPFDLIEKSDIECAKDSYEEDLESLLALIGDEYAELFVAAK
NAYSAVVLSSIITVAETETNAKLSASMIERFDTHEEDLGELKAFIKLHLP
KHYEEIFSNTEKHGYAGYIDGKTKQADFYKYMKMTLENIEGADYFIAKIE
KENFLRKQRTFDNGAIPHQLHLEELEAILHQQAKYYPFLKENYDKIKSLV
TFRIPYFVGPLANGQSEFAWLTRKADGEIRPWNIEEKVDFGKSAVDFIEK
MTNKDTYLPKENVLPKHSLCYQKYLVYNELTKVRYINDQGKTSYFSGQEK
EQIFNDLFKQKRKVKKKDLELFLRNMSHVESPTIEGLEDSFNSSYSTYHD
LLKVGIKQEILDNPVNTEMLENIVKILTVFEDKRMIKEQLQQFSDVLDGV
VLKKLERRHYTGWGRLSAKLLMGIRDKQSHLTILDYLMNDDGLNRNLMQL
INDSNLSFKSIIEKEQVTTADKDIQSIVADLAGSPAIKKGILQSLKIVDE
LVSVMGYPPQTIVVEMARENQTTGKGKNNSRPRYKSLEKAIKEFGSQILK
EHPTDNQELRNNRLYLYYLQNGKDMYTGQDLDIHNLSNYDIDHIVPQSFI
TDNSIDNLVLTSSAGNREKGDDVPPLEIVRKRKVFWEKLYQGNLMSKRKF
DYLTKAERGGLTEADKARFIHRQLVETRQITKNVANILHQRFNYEKDDHG
NTMKQVRIVTLKSALVSQFRKQFQLYKVRDVNDYHHAHDAYLNGVVANTL
LKVYPQLEPEFVYGDYHQFDWFKANKATAKKQFYTNIMLFFAQKDRIIDE
NGEILWDKKYLDTVKKVMSYRQMNIVKKTEIQKGEFSKATIKPKGNSSKL
IPRKTNWDPMKYGGLDSPNMAYAVVIEYAKGKNKLVFEKKIIRVTIMERK
AFEKDEKAFLEEQGYRQPKVLAKLPKYTLYECEEGRRRMLASANEAQKGN
QQVLPNHLVTLLHHAANCEVSDGKSLDYIESNREMFAELLAHVSEFAKRY
TLAEANLNKINQLFEQNKEGDIKAIAQSFVDLMAFNAMGAPASFKFFETT
IERKRYNNLKELLNSTIIYQSITGLYESRKRLDD

[0209] In some embodiments the Cas9 protein can be L. pneumophilia Cas9 and may comprise or consist of the amino acid sequence:

(SEQ ID NO: 166)

MESSQILSPIGIDLGGKFTGVCLSHLEAFAELPNHANTKYSVILIDHNNF
QLSQAQRRATRHRVRNKKRNQFVKRVALQLFQHILSRDLNAKEETALCHY
LNNRGYTYVDTDLDEYIKDETTINLLKELLPSESEHNFIDWFLQKMQSSE
FRKILVSKVEEKKDDKELKNAVKNIKNFITGFEKNSVEGHRHRKVYFENI
KSDITKDNQLDSIKKKIPSVCLSNLLGHLSNLQWKNLHRYLAKNPKQFDE
QTFGNEFLRMLKNFRHLKGSQESLAVRNLIQQLEQSQDYISILEKTPPEI
TIPPYEARTNTGMEKDQSLLLNPEKLNNLYPNWRNLIPGIIDAHPFLEKD
LEHTKLRDRKRIISPSKQDEKRDSYILQRYLDLNKKIDKFKIKKQLSFLG
QGKQLPANLIETQKEMETHFNSSLVSVLIQIASAYNKEREDAAQGIWFDN
AFSLCELSNINPPRKQKILPLLVGAILSEDFINNKDKWAKFKIFWNTHKI
GRTSLKSKCKEIEEARKNSGNAFKIDYEEALNHPEHSNNKALIKIIQTIP
DIIQAIQSHLGHNDSQALIYHNPFSLSQLYTILETKRDGFHKNCVAVTCE
NYWRSQKTEIDPEISYASRLPADSVRPFDGVLARMMQRLAYEIAMAKWEQ
IKHIPDNSSLLIPIYLEQNRFEFEESFKKIKGSSSDKTLEQAIEKQNIQW
EEKFQRIINASMNICPYKGASIGGQGEIDHIYPRSLSKKHFGVIFNSEVN
LIYCSSQGNREKKEEHYLLEHLSPLYLKHQFGTDNVSDIKNFISQNVANI
KKYISFHLLTPEQQKAARHALFLDYDDEAFKTITKFLMSQQKARVNGTQK
FLGKQIMEFLSTLADSKQLQLEFSIKQITAEEVHDHRELLSKQEPKLVKS
RQQSFPSHAIDATLTMSIGLKEFPQFSQELDNSWFINHLMPDEVHLNPVR
SKEKYNKPNISSTPLFKDSLYAERFIPVWVKGETFAIGFSEKDLFEIKPS
NKEKLFTLLKTYSTKNPGESLQELQAKSKAKWLYFPINKTLALEFLHHYF
HKEIVTPDDTTVCHFINSLRYYTKKESITVKILKEPMPVLSVKFESSKKN
VLGSFKHTIALPATKDWERLFNHPNFLALKANPAPNPKEFNEFIRKYFLS
DNNPNSDIPNNGHNIKPQKHKAVRKVFSLPVIPGNAGTMMRIRRKDNKGQ
PLYQLQTIDDTPSMGIQINEDRLVKQEVLMDAYKTRNLSTIDGINNSEGQ
AYATFDNWLTLPVSTFKPEIIKLEMKPHSKTRRYIRITQSLADFIKTIDE
ALMIKPSDSIDDPLNMPNEIVCKNKLFGNELKPRDGKMKIVSTGKIVTYE
FESDSTPQWIQTLYVTQLKKQP

[0210] In some embodiments the Cas9 protein can be N lactamica Cas9 and may comprise or consist of the amino acid sequence:

(SEQ ID NO: 167)

MAAFKPNPMNYILGLDIGIASVGWAMVEVDEEENPIRLIDLGVRVFERAE
VPKTGDSLAMARRLARSVRRLTRRRAHRLLRARRLLKREGVLQDADFDEN
GLVKSLPNTPWQLRAAALDRKLTCLEWSAVLLHLVKHRGYLSQRKNEGET
ADKELGALLKGVADNAHALQTGDFRTPAELALNKFEKESGHIRNQRGDYS
HTFSRKDLQAELNLLFEKQKEFGNPHVSDGLKEDIETLLMAQRPALSGDA
VQKMLGHCTFEPAEPKAAKNTYTAERFIWLTKLNNLRILEQGSERPLTDT
ERATLMDEPYRKSKLTYAQARKLLGLEDTAFFKGLRYGKDNAEASTLMEM
KAYHAISRALEKEGLKDKKSPLNLSTELQDEIGTAFSLFKTDKDITGRLK
DRVQPEILEALLKHISFDKFVQISLKALRRIVPLMEQGKRYDEACAEIYG
DHYCKKNAEEKIYLPPIPADEIRNPVVLRALSQARKVINCVVRRYGSPAR
IHIETAREVGKSFKDRKEIEKRQEENRKDREKAAAKFREYFPNFVGEPKS
KDILKLRLYEQQHGKCLYSGKEINLVRLNEKGYVEIDHALPFSRTWDDSF
NNKVLVLGSENQNKGNQTPYEYFNGKDNSREWQEFKARVETSRFPRSKKQ
RILLQKFDEEGFKERNLNDTRYVNRFLCQFVADHILLTGKGKRRVFASNG
QITNLLRGFWGLRKVRIENDRHHALDAVVVACSTVAMQQKITRFVRYKEM
NAFDGKTIDKETGEVLHQKAHFPQPWEFFAQEVMIRVFGKPDGKPEFEEA
DTPEKLRTLLAEKLSSRPEAVHEYVTPLFVSRAPNRKMSGQGHMETVKSA
KRLDEGISVLRVPLTQLKLKGLEKMVNREREPKLYDALKAQLETHKDDPA
KAFAEPFYKYDKAGSRTQQVKAVRIEQVQKTGVWVRNHNGIADNATMVRV
DVFEKGGKYYLVPIYSWQVAKGILPDRAVVAFKDEEDWTVMDDSFEFRFV
LYANDLIKLTAKKNEFLGYFVSLNRATGAIDIRTHDTDSTKGKNGIFQSV
GVKTALSFQKNQIDELGKEIRPCRLKKRPPVR

[0211] In some embodiments the Cas9 protein can be N. meningitides Cas9 and may comprise or consist of the amino acid sequence:

(SEQ ID NO: 168)

MAAFKPNPINYILGLDIGIASVGWAMVEIDEDENPICLIDLGVRVFERAE
VPKTGDSLAMARRLARSVRRLTRRRAHRLLRARRLLKREGVLQAADFDEN
GLIKSLPNTPWQLRAAALDRKLTPLEWSAVLLHLIKHRGYLSQRKNEGET
ADKELGALLKGVADNAHALQTGDFRTPAELALNKFEKESGHIRNQRGDYS
HTFSRKDLQAELILLFEKQKEFGNPHVSGGLKEGIETLLMTQRPALSGDA
VQKMLGHCTFEPAEPKAAKNTYTAERFIWLTKLNNLRILEQGSERPLTDT
ERATLMDEPYRKSKLTYAQARKLLGLEDTAFFKGLRYGKDNAEASTLMEM
KAYHAISRALEKEGLKDKKSPLNLSPELQDEIGTAFSLFKTDEDITGRLK
DRIQPEILEALLKHISFDKFVQISLKALRRIVPLMEQGKRYDEACAEIYG
DHYGKKNTEEKIYLPPIPADEIRNPVVLRALSQARKVINGVVRRYGSPAR
IHIETAREVGKSFKDRKEIEKRQEENRKDREKAAAKFREYFPNFVGEPKS
KDILKLRLYEQQHGKCLYSGKEINLGRLNEKGYVEIDHALPFSRTWDDSF
NNKVLVLGSENQNKGNQTPYEYFNGKDNSREWQEFKARVETSRFPRSKKQ
RILLQKFDEDGFKERNLNDTRYVNRFLCQFVADRMRLTGKGKKRVFASNG
QITNLLRGFWGLRKVRAENDRHHALDAVVVACSTVAMQQKITRFVRYKEM
NAFDGKTIDKETGEVLHQKTHFPQPWEFFAQEVMIRVFGKPDGKPEFEEA
DTPEKLRTLLAEKLSSRPEAVHEYVTPLFVSRAPNRKMSGQGHMETVKSA
KRLDEGVSVLRVPLTQLKLKDLEKMVNREREPKLYEALKARLEAHKDDPA
KAFAEPFYKYDKAGNRTQQVKAVRVEQVQKTGVWVRNHNGIADNATMVRV
DVFEKGDKYYLVPIYSWQVAKGILPDRAVVQGKDEEDWQLIDDSFNFKFS
LHPNDLVEVITKKARMFGYFASCHRGTGNINIRIHDLDHKIGKNGILEGI
GVKTALSFQKYQIDELGKEIRPCRLKKRPPVR

[0212] In some embodiments the Cas9 protein can be B. longum Cas9 and may comprise or consist of the amino acid sequence:

(SEQ ID NO: 169)

MLSRQLLGASHLARPVSYSYNVQDNDVHCSYGERCFMRGKRYRIGIDVGL
NSVGLAAVEVSDENSPVRLLNAQSVIHDGGVDPQKNKEAITRKNMSGVAR
RTRRMRRRKRERLHKLDMLLGKFGYPVIEPESLDKPFEEWHVRAELATRY
IEDDELRRESISIALRHMARHRGWRNPYRQVDSLISDNPYSKQYGELKEK
AKAYNDDATAAEEESTPAQLVVAMLDAGYAEAPRLRWRTGSKKPDAEGYL
PVRLMQEDNANELKQIFRVQRVPADEWKPLFRSVFYAVSPKGSAEQRVGQ
DPLAPEQARALKASLAFQEYRIANVITNLRIKDASAELRKLTVDEKQSIY
DQLVSPSSEDITWSDLCDFLGFKRSQLKGVGSLTEDGEERISSRPPRLTS
VQRIYESDNKIRKPLVAWWKSASDNEHEAMIRLLSNTVDIDKVREDVAYA
SAIEFIDGLDDDALTKLDSVDLPSGRAAYSVETLQKLTRQMLTTDDDLHE
ARKTLFNVTDSWRPPADPIGEPLGNPSVDRVLKNVNRYLMNCQQRWGNPV
SVNIEHVRSSFSSVAFARKDKREYEKNNEKRSIFRSSLSEQLRADEQMEK
VRESDLRRLEAIQRQNGQCLYCGRTITFRTCEMDHIVPRKGVGSTNTRTN
FAAVCAECNRMKSNTPFAIWARSEDAQTRGVSLAEAKKRVTMFTFNPKSY
APREVKAFKQAVIARLQQTEDDAAIDNRSIESVAWMADELHRRIDWYFNA
KQYVNSASIDDAEAETMKTTVSVFQGRVTASARRAAGIEGKIHFIGQQSK
TRLDRRHHAVDASVIAMMNTAAAQTLMERESLRESQRLIGLMPGERSWKE
YPYEGTSRYESFHLWLDNMDVLLELLNDALDNDRIAVMQSQRYVLGNSIA
HDATIHPLEKVPLGSAMSADLIRRASTPALWCALTRLPDYDEKEGLPEDS
HREIRVHDTRYSADDEMGFFASQAAQIAVQEGSADIGSAIHHARVYRCWK
TNAKGVRKYFYGMIRVFQTDLLRACHDDLFTVPLPPQSISMRYGEPRVVQ
ALQSGNAQYLGSLVVGDEIEMDFSSLDVDGQIGEYLQFFSQFSGGNLAWK
HWVVDGFFNQTQLRIRPRYLAAEGLAKAFSDDVVPDGVQKIVTKQGWLPP
VNTASKTAVRIVRRNAFGEPRLSSAHHMPCSWQWRHE

[0213] In some embodiments the Cas9 protein can be A. muciniphila Cas9 and may comprise or consist of the amino acid sequence:

(SEQ ID NO: 170)

MSRSLTFSFDIGYASIGWAVIASASHDDADPSVCGCGTVLFPKDDCQAFK
RREYRRLRRNIRSRRVRIERIGRLLVQAQIITPEMKETSGHPAPFYLASE
ALKGHRTLAPIELWHVLRWYAHNRGYDNNASWSNSLSEDGGNGEDTERVK
HAQDLMDKHGTATMAETICRELKLEEGKADAPMEVSTPAYKNLNTAFPRL
IVEKEVRRILELSAPLIPGLTAEIIELIAQHHPLTTEQRGVLLQHGIKLA
RRYRGSLLFGQLIPRFDNRIISRCPVTWAQVYEAELKKGNSEQSARERAE
KLSKVPTANCPEFYEYRMARILCNIRADGEPLSAEIRRELMNQARQEGKL
TKASLEKAISSRLGKETETNVSNYFTLHPDSEEALYLNPAVEVLQRSGIG
QILSPSVYRIAANRLRRGKSVTPNYLLNLLKSRGESGEALEKKIEKESKK
KEADYADTPLKPKYATGRAPYARTVLKKVVEEILDGEDPTRPARGEAHPD
GELKAHDGCLYCLLDTDSSVNQHQKERRLDTMTNNHLVRHRMLILDRLLK
DLIQDFADGQKDRISRVCVEVGKELTTFSAMDSKKIQRELTLRQKSHTDA
VNRLKRKLPGKALSANLIRKCRIAMDMNWTCPFTGATYGDHELENLELEH
IVPHSFRQSNALSSLVLTWPGVNRMKGQRTGYDFVEQEQENPVPDKPNLH
ICSLNNYRELVEKLDDKKGHEDDRRRKKKRKALLMVRGLSHKHQSQNHEA
MKEIGMTEGMMTQSSHLMKLACKSIKTSLPDAHIDMIPGAVTAEVRKAWD
VFGVFKELCPEAADPDSGKILKENLRSLTHLHHALDACVLGLIPYIIPAH
HNGLLRRVLAMRRIPEKLIPQVRPVANQRHYVLNDDGRMMLRDLSASLKE
NIREQLMEQRVIQHVPADMGGALLKETMQRVLSVDGSGEDAMVSLSKKKD
GKKEKNQVKASKLVGVFPEGPSKLKALKAAIEIDGNYGVALDPKPVVIRH
IKVFKRIMALKEQNGGKPVRILKKGMLIHLTSSKDPKHAGVWRIESIQDS
KGGVKLDLQRAHCAVPKNKTHECNWREVDLISLLKKYQMKRYPTSYTGT
PR

[0214] In some embodiments the Cas9 protein can be O. laneus Cas9 and may comprise or consist of the amino acid sequence:

(SEQ ID NO: 171)

METTLGIDLGTNSIGLALVDQEEHQILYSGVRIFPEGINKDTIGLGEKEE
SRNATRRAKRQMRRQYFRKKLRKAKLLELLIAYDMCPLKPEDVRRWKNWD
KQQKSTVRQFPDTPAFREWLKQNPYELRKQAVTEDVTRPELGRILYQMIQ
RRGFLSSRKGKEEGKIFTGKDRMVGIDETRKNLQKQTLGAYLYDIAPKNG
EKYRFRTERVRARYTLRDMYIREFEIIWQRQAGHLGLAHEQATRKKNIFL
EGSATNVRNSKLITHLQAKYGRGHVLIEDTRITVTFQLPLKEVLGGKIEI
EEEQLKFKSNESVLFWQRPLRSQKSLLSKCVFEGRNFYDPVHQKWIIAGP
TPAPLSHPEFEEFRAYQFINNIIYGKNEHLTAIQREAVFELMCTESKDFN
FEKIPKHLKLFEKFNFDDTTKVPACTTISQLRKLFPHPVWEEKREEIWHC
FYFYDDNTLLFEKLQKDYALQTNDLEKIKKIRLSESYGNVSLKAIRRINP
YLKKGYAYSTAVLLGGIRNSFGKRFEYFKEYEPEIEKAVCRILKEKNAEG
EVIRKIKDYLVHNRFGFAKNDRAFQKLYHHSQAITTQAQKERLPETGNLR
NPIVQQGLNELRRTVNKLLATCREKYGPSFKFDHIHVEMGRELRSSKTER
EKQSRQIRENEKKNEAAKVKLAEYGLKAYRDNIQKYLLYKEIEEKGGTVC
CPYTGKTLNISHTLGSDNSVQIEHIIPYSISLDDSLANKTLCDATFNREK
GELTPYDFYQKDPSPEKWGASSWEEIEDRAFRLLPYAKAQRFIRRKPQES
NEFISRQLNDTRYISKKAVEYLSAICSDVKAFPGQLTAELRHLWGLNNIL
QSAPDITFPLPVSAENHREYYVITNEQNEVIRLFPKQGETPRIEKGELLL
TGEVERKVFRCKGMQEFQTDVSDGKYWRRIKLSSSVTWSPLFAPKPISAD
GQIVLKGRIEKGVFVCNQLKQKLKTGLPDGSYWISLPVISQTFKEGESVN
NSKLTSQQVQLFGRVREGIFRCHNYQCPASGADGNFWCTLDTDTAQPAFT
PIKNAPPGVGGGQIILTGDVDDKGIFHADDDLHYELPASLPKGKYYGIFT
VESCDPTLIPIELSAPKTSKGENLIEGNIWVDEHTGEVRFDPKKNREDQR
HHAIDAIVIALSSQSLFQRLSTYNARRENKKRGLDSTEHFPSPWPGFAQD
VRQSVVPLLVSYKQNPKTLCKISKTLYKDGKKIHSCGNAVRGQLHKETVY
GQRTAPGATEKSYHIRKDIRELKTSKHIGKVVDITIRQMLLKHLQENYHI
DITQEFNIPSNAFFKEGVYRIFLPNKHGEPVPIKKIRMKEELGNAERLKD
NINQYVNPRNNHHVMIYQDADGNLKEEIVSFWSVIERQNQGQPIYQLPRE
GRNIVSILQINDTFLIGLKEEEPEVYRNDLSTLSKHLYRVQKLSGMYYTF
RHHLASTLNNEREEFRIQSLEAWKRANPVKVQIDEIGRITFLNGPLC.

[0215] In some embodiments of the compositions of the disclosure, the sequence encoding the first RNA binding protein comprises a sequence isolated or derived from a CRISPR Cas protein. In some embodiments, the CRISPR Cas protein comprises a Type V CRISPR Cas protein. In some embodiments, the Type V CRISPR Cas protein comprises a Cpf1 protein. Exemplary Cpf1 proteins of the disclosure may be isolated or derived from any species, including, but not limited to, a bacteria or an archaea. Exemplary Cpf1 proteins of the disclosure may be isolated or derived from any species, including, but not limited to, Francisella tularensis subsp. novicida, Acidaminococcus sp. BV3L6 and Lachnospiraceae bacterium sp. ND2006. Exemplary Cpf1 proteins of the disclosure may be nuclease inactivated.

[0216] Exemplary wild type Francisella tularensis subsp. Novicida Cpf1 (FnCpf1) proteins of the disclosure may comprise or consist of the amino acid sequence:

| (SEQ ID NO: 172) | |
|---|---|
| 1 | MSIYQEFVNK YSLSKTLRFE LIPQGKTLEN IKARGLILDD EKRAKDYKKA KQIIDKYHQF |
| 61 | FIEEILSSVC ISEDLLQNYS DVYFKLKKSD DDNLQKDFKS AKDTIKKQIS EYIKDSEKFK |
| 121 | NLFNQNLIDA KKGQESDLIL WLKQSKDNGI ELFKANSDIT DIDEALEIIK SFKGWTTYFK |
| 181 | GFHENRKNVY SSNDIPTSII YRIVDDNLPK FLENKAKYES LKDKAPEAIN YEQIKKDLAE |
| 241 | ELTFDIDYKT SEVNQRVFSL DEVFEIANFN NYLNQSGITK FNTIIGGKFV NGENTKRKGI |
| 301 | NEYINLYSQQ INDKTLKKYK MSVLFKQILS DTESKSFVID KLEDDSDVVT TMQSFYEQIA |
| 361 | AFKTVEEKSI KETLSLLFDD LKAQKLDLSK IYFKNDKSLT DLSQQVFDDY SVIGTAVLEY |
| 421 | ITQQIAPKNL DNPSKKEQEL IAKKTEKAKY LSLETIKLAL EEFNKHRDID KQCRFEEILA |
| 481 | NFAAIPMIFD EIAQNKDNLA QISIKYQNQG KKDLLQASAE DDVKAIKDLL DQTNNLLHKL |
| 541 | KIFHISQSED KANILDKDEH FYLVFEECYF ELANIVPLYN KIRNYITQKP YSDEKFKLNF |
| 601 | ENSTLANGWD KNKEPDNTAI LFIKDDKYYL GVMNKKNNKI FDDKAIKENK GEGYKKIVYK |
| 661 | LLPGANKMLP KVFFSAKSIK FYNPSEDILR IRNHSTHTKN GSPQKGYEKF EFNIEDCRKF |
| 721 | IDFYKQSISK HPEWKDFGFR FSDTQRYNSI DEFYREVENQ GYKLTFENIS ESYIDSVVNQ |
| 781 | GKLYLFQIYN KDFSAYSKGR PNLHTLYWKA LFDERNLQDV VYKLNGEAEL FYRKQSIPKK |
| 841 | ITHPAKEAIA NKNKDNPKKE SVFEYDLIKD KRFTEDKFFF HCPITINFKS SGANKFNDEI |
| 901 | NLLLKEKAND VHILSIDRGE RHLAYYTLVD GKGNIIKQDT FNIIGNDRMK TNYHDKLAAI |
| 961 | EKDRDSARKD WKKINNIKEM KEGYLSQVVH EIAKLVIEYN AIVVFEDLNF GFKRGRFKVE |
| 1021 | KQVYQKLEKM LIEKLNYLVF KDNEFDKTGG VLRAYQLTAP FETFKKMGKQ TGIIYYVPAG |
| 1081 | FTSKICPVTG FVNQLYPKYE SVSKSQEFFS KFDKICYNLD KGYFEFSFDY KNFGDKAAKG |
| 1141 | KWTIASFGSR LINFRNSDKN HNWDTREVYP TKELEKLLKD YSIEYGHGEC IKAAICGESD |
| 1201 | KKFFAKLTSV LNTILQMRNS KTGTELDYLI SPVADVNGNF FDSRQAPKNM PQDADANGAY |
| 1261 | HIGLKGLMLL GRIKNNQEGK KLNLVIKNEE YFEFVQNRNN. |

[0217] Exemplary wild type Lachnospiraceae bacterium sp. ND2006 Cpf1 (LbCpf1) proteins of the disclosure may comprise or consist of the amino acid sequence:

| (SEQ ID NO: 173) | |
|---|---|
| 1 | AASKLEKFTN CYSLSKTLRF KAIPVGKTQE NIDNKRLLVE DEKRAEDYKG VKKLLDRYYL |
| 61 | SFINDVLHSI KLKNLNNYIS LFRKKTRTEK ENKELENLEI NLRKEIAKAF KGAAGYKSLF |
| 121 | KKDIIETILP EAADDKDEIA LVNSFNGFTT AFTGFFDNRE NMFSEEAKST SIAFRCINEN |
| 181 | LTRYISNMDI FEKVDAIFDK HEVQEIKEKI LNSDYDVEDF FEGEFFNFVL TQEGIDVYNA |
| 241 | IIGGFVTESG EKIKGLNEYI NLYNAKTKQA LPKFKPLYKQ VLSDRESLSF YGEGYTSDEE |
| 301 | VLEVFRNTLN KNSEIFSSIK KLEKLFKNFD EYSSAGIFVK NGPAISTISK DIFGEWNLIR |
| 361 | DKWNAEYDDI HLKKKAVVTE KYEDDRRKSF KKIGSFSLEQ LQEYADADLS VVEKLKEIII |
| 421 | QKVDEIYKVY GSSEKLFDAD FVLEKSLKKN DAVVAIMKDL LDSVKSFENY IKAFFGEGKE |
| 481 | TNRDESFYGD FVLAYDILLK VDHIYDAIRN YVTQKPYSKD KFKLYFQNPQ FMGGWDKDKE |
| 541 | TDYRATILRY GSKYYLAIMD KKYAKCLQKI DKDDVNGNYE KINYKLLPGP NKMLPKVFFS |
| 601 | KKWMAYYNPS EDIQKIYKNG TFKKGDMFNL NDCHKLIDFF KDSISRYPKW SNAYDFNFSE |
| 661 | TEKYKDIAGF YREVEEQGYK VSFESASKKE VDKLVEEGKL YMFQIYNKDF SDKSHGTPNL |
| 721 | HTMYFKLLFD ENNHGQIRLS GGAELFMRRA SLKKEELVVH PANSPIANKN PDNPKKTTTL |
| 781 | SYDVYKDKRF SEDQYELHIP IAINKCPKNI FKINTEVRVL LKHDDNPYVI GIDRGERNLL |
| 841 | YIVVVDGKGN IVEQYSLNEI INNFNGIRIK TDYHSLLDKK EKERFEARQN WTSIENIKEL |
| 901 | KAGYISQVVH KICELVEKYD AVIALEDLNS GFKNSRVKVE KQVYQKFEKM LIDKLNYMVD |
| 961 | KKSNPCATGG ALKGYQITNK FESFKSMSTQ NGFIFYIPAW LTSKIDPSTG FVNLLKTKYT |
| 1021 | SIADSKKFIS SFDRIMYVPE EDLFEFALDY KNFSRTDADY IKKWKLYSYG NRIRIFAAAK |
| 1081 | KNNVFAWEEV CLTSAYKELF NKYGINYQQG DIRALLCEQS DKAFYSSFMA LMSLMLQMRN |
| 1141 | SITGRTDVDF LISPVKNSDG IFYDSRNYEA QENAILPKNA DANGAYNIAR KVLWAIGQFK |
| 1201 | KAEDEKLDKV KIAISNKEWL EYAQTSVK. |

[0218] Exemplary wild type Acidaminococcus sp. BV3L6 Cpf1 (AsCpf1) proteins of the disclosure may comprise or consist of the amino acid sequence:

| (SEQ ID NO: 174) | |
|---|---|
| 1 | MTQFEGFTNL YQVSKTLRFE LIPQGKTLKH IQEQGFIEED KARNDHYKEL KPIIDRIYKT |
| 61 | YADQCLQLVQ LDWENLSAAI DSYRKEKTEE TRNALIEEQA TYRNAIHDYF IGRTDNLTDA |
| 121 | INKRHAEIYK GLFKAELFNG KVLKQLGTVT TTEHENALLR SFDKFTTYFS GFYENRKNVF |
| 181 | SAEDISTAIP HRIVQDNFPK FKENCHIFTR LITAVPSLRE HFENVKKAIG IFVSTSIEEV |
| 241 | FSFPFYNQLL TQTQIDLYNQ LLGGISREAG TEKIKGLNEV LNLAIQKNDE TAHIIASLPH |
| 301 | RFIPLFKQIL SDRNTLSFIL EEFKSDEEVI QSFCKYKTLL RNENVLETAE ALFNELNSID |
| 361 | LTHIFISHKK LETISSALCD HWDTLRNALY ERRISELTGK ITKSAKEKVQ RSLKHEDINL |
| 421 | QEIISAAGKE LSEAFKQKTS EILSHAHAAL DQPLPTTLKK QEEKEILKSQ LDSLLGLYHL |
| 481 | LDWFAVDESN EVDPEFSARL TGIKLEMEPS LSFYNKARNY ATKKPYSVEK FKLNFQMPTL |
| 541 | ASGWDVNKEK NNGAILFVKN GLYYLGIMPK QKGRYKALSF EPTEKTSEGF DKMYYDYFPD |
| 601 | AAKMIPKCST QLKAVTAHFQ THTTPILLSN NFIEPLEITK EIYDLNNPEK EPKKFQTAYA |
| 661 | KKTGDQKGYR EALCKWIDFT RDFLSKYTKT TSIDLSSLRP SSQYKDLGEY YAELNPLLYH |
| 721 | ISFQRIAEKE IMDAVETGKL YLFQIYNKDF AKGHHGKPNL HTLYWTGLFS PENLAKTSIK |
| 781 | LNGQAELFYR PKSRMKRMAH RLGEKMLNKK LKDQKTPIPD TLYQELYDYV NHRLSHDLSD |
| 841 | EARALLPNVI TKEVSHEIIK DRRFTSDKFF FHVPITLNYQ AANSPSKFNQ RVNAYLKEHP |
| 901 | ETPIIGIDRG ERNLIYITVI DSTGKILEQR SLNTIQQFDY QKKLDNREKE RVAARQAWSV |
| 961 | VGTIKDLKQG YLSQVIHEIV DLMIHYQAVV VLENLNFGFK SKRTGIAEKA VYQQFEKMLI |
| 1021 | DKLNCLVLKD YPAEKVGGVL NPYQLTDQFT SFAKMGTQSG FLFYVPAPYT SKIDPLTGFV |
| 1081 | DPFVWKTIKN HESRKHFLEG FDFLHYDVKT GDFILHFKMN RNLSFQRGLP GFMPAWDIVF |
| 1141 | EKNETQFDAK GTPFIAGKRI VPVIENHRFT GRYRDLYPAN ELIALLEEKG IVFRDGSNIL |
| 1201 | PKLLENDDSH AIDTMVALIR SVLQMRNSNA ATGEDYINSP VRDLNGVCFD SRFQNPEWPM |
| 1261 | DADANGAYHI ALKGQLLLNH LKESKDLKLQ NGISNQDWLA YIQELRN. |

[0219] In some embodiments of the compositions of the disclosure, the sequence encoding the first RNA binding protein comprises a sequence isolated or derived from a CRISPR Cas protein. In some embodiments, the CRISPR Cas protein comprises a Type VI CRISPR Cas protein or portion thereof. In some embodiments, the Type VI CRISPR Cas protein comprises a Cas13 protein or portion thereof. Exemplary Cas13 proteins of the disclosure may be isolated or derived from any species, including, but not limited to, a bacteria or an archaea. Exemplary Cas13 proteins of the disclosure may be isolated or derived from any species, including, but not limited to, Leptotrichia wadei, Listeria seeligeri serovar 1/2b (strain ATCC 35967/DSM 20751/CIP 100100/SLCC 3954), Lachnospiraceae bacterium, Clostridium aminophilum DSM 10710, Carnobacterium gallinarum DSM 4847, Paludibacter propionicigenes WB4, Listeria weihenstephanensis FSL R9-0317, Listeria weihenstephanensis FSL R9-0317, bacterium FSL M6-0635 (Listeria newyorkensis), Leptotrichia wadei F0279, Rhodobacter capsulatus SB 1003, Rhodobacter capsulatus R121, Rhodobacter capsulatus DE442 and Corynebacterium ulcerans. Exemplary Cas13 proteins of the disclosure may be DNA nuclease inactivated. Exemplary Cas13 proteins of the disclosure include, but are not limited to, Cas13a, Cas13b, Cas13c, Cas13d and orthologs thereof. Exemplary Cas13b proteins of the disclosure include, but are not limited to, subtypes 1 and 2 referred to herein as Csx27 and Csx28, respectively.

[0220] Exemplary Cas13a proteins include, but are not limited to:

| Cas13a | Cas13a | | | |
|---|---|---|---|---|
| number | abbreviation | Organism name | Accession number | Direct Repeat sequence |
| Cas13a1 | LshCas13a | Leptotrichia | WP_018451595.1 | CCACCCCAATATCGAAGGGGACTAA |
| | | shahii | | AAC (SEQ ID NO: 175) |
| Cas13a2 | LwaCas13a | Leptotrichia | WP_021746774.1 | GATTTAGACTACCCCAAAAACGAAG |
| | | wadei | | GGGACTAAAAC (SEQ ID NO: 176) |
| Cas13a3 | LseCas13a | Listeria seeligeri | WP_012985477.1 | GTAAGAGACTACCTCTATATGAAAG |
| | | | | AGGACTAAAAC (SEQ ID NO: 177) |
| Cas13a4 | LbmCas13a | Lachnospiraceae | WP_044921188.1 | GTATTGAGAAAAGCCAGATATAGTT |
| | | bacterium | | GGCAATAGAC (SEQ ID NO: 178) |
| | | MA2020 | | |
| Cas13a5 | LbnCas13a | Lachnospiraceae | WP_022785443.1 | GTTGATGAGAAGAGCCCAAGATAG |
| | | bacterium | | AGGGCAATAAC (SEQ ID NO: 179) |
| | | NK4A179 | | |
| Cas13a6 | CamCas13a | [Clostridium] | WP_031473346.1 | GTCTATTGCCCTCTATATCGGGCTGT |
| | | aminophilum | | TCTCCAAAC (SEQ ID NO: 180) |
| | | DSM 10710 | | |
| Cas13a7 | CgaCas13a | Carnobacterium | WP_034560163.1 | ATTAAAGACTACCTCTAAATGTAAG |
| | | gallinarum DSM | | AGGACTATAAC (SEQ ID NO: 181) |
| | | 4847 | | |
| Cas13a8 | Cga2Cas13a | Carnobacterium | WP_034563842.1 | AATATAAACTACCTCTAAATGTAAG |
| | | gallinarum DSM | | AGGACTATAAC (SEQ ID NO: 182) |
| | | 4847 | | |
| Cas13a9 | Pprcas13a | Paludibacter | WP_013443710.1 | CTTGTGGATTATCCCAAAATTGAAG |
| | | propionicigenes | | GGAACTACAAC (SEQ ID NO: 183) |
| | | WB4 | | |
| Cas13a10 | LweCas13a | Listeria | WP_036059185.1 | GATTTAGAGTACCTCAAAATAGAAG |
| | | weihenstephanensis | | AGGTCTAAAAC (SEQ ID NO: 184) |
| | | FSL R9-0317 | | |
| Cas13a11 | LbfCas13a | Listeriaceae | WP_036091002.1 | GATTTAGAGTACCTCAAAACAAAAG |
| | | bacterium FSL | | AGGACTAAAAC (SEQ ID NO: 185) |
| | | M6-0635 | | |
| | | (Listeria | | |
| | | newyorkensis) | | |
| Cas13a12 | Lwa2cas13a | Leptotrichia | WP_021746774.1 | GATATAGATAACCCCAAAAACGAA |
| | | wadei F0279 | | GGGATCTAAAAC (SEQ ID NO: 186) |
| Cas13a13 | RcsCas13a | Rhodobacter | WP_013067728.1 | GCCTCACATCACCGCCAAGACGACG |
| | | capsulatus SB | | GCGGACTGAAC (SEQ ID NO: 187) |
| | | 1003 | | |
| Cas13a14 | RcrCas13a | Rhodobacter | WP_023911507.1 | GCCTCACATCACCGCCAAGACGACG |
| | | capsulatus R121 | | GCGGACTGAAC (SEQ ID NO: 188) |
| Cas13a15 | RcdCas13a | Rhodobacter | WP_023911507.1 | GCCTCACATCACCGCCAAGACGACG |
| | | capsulatus | | GCGGACTGAAC (SEQ ID NO: 189) |
| | | DE442 | | |

[0221] Exemplary wild type Cas13a proteins of the disclosure may comprise or consist of the amino acid sequence:

| (SEQ ID NO: 190) | |
|---|---|
| 1 | MGNLFGHKRW YEVRDKKDFK IKRKVKVKRN YDGNKYILNI NENNNKEKID NNKFIRKYIN |
| 61 | YKKNDNILKE FTRKFHAGNI LFKLKGKEGI IRIENNDDFL ETEEVVLYIE AYGKSEKLKA |
| 121 | LGITKKKIID EAIRQGITKD DKKIEIKRQE NEEEIEIDIR DEYTNKTLND CSIILRIIEN |
| 181 | DELETKKSIY EIFKNINMSL YKIIEKIIEN ETEKVFENRY YEEHLREKLL KDDKIDVILT |
| 241 | NFMEIREKIK SNLEILGFVK FYLNVGGDKK KSKNKKMLVE KILNINVDLT VEDIADFVIK |
| 301 | ELEFWNITKR IEKVKKVNNE FLEKRRNRTY IKSYVLLDKH EKFKIERENK KDKIVKFFVE |
| 361 | NIKNNSIKEK IEKILAEFKI DELIKKLEKE LKKGNCDTEI FGIFKKHYKV NFDSKKFSKK |
| 421 | SDEEKELYKI IYRYLKGRIE KILVNEQKVR LKKMEKIEIE KILNESILSE KILKRVKQYT |
| 481 | LEHIMYLGKL RHNDIDMTTV NTDDFSRLHA KEELDLELIT FFASTNMELN KIFSRENINN |
| 541 | DENIDFFGGD REKNYVLDKK ILNSKIKIIR DLDFIDNKNN ITNNFIRKFT KIGTNERNRI |
| 601 | LHAISKERDL QGTQDDYNKV INIIQNLKIS DEEVSKALNL DVVFKDKKNI ITKINDIKIS |
| 661 | EENNNDIKYL PSFSKVLPEI LNLYRNNPKN EPFDTIETEK IVLNALIYVN KELYKKLILE |
| 721 | DDLEENESKN IFLQELKKTL GNIDEIDENI IENYYKNAQI SASKGNNKAI KKYQKKVIEC |
| 781 | YIGYLRKNYE ELFDFSDFKM NIQEIKKQIK DINDNKTYER ITVKTSDKTI VINDDFEYII |
| 841 | SIFALLNSNA VINKIRNRFF ATSVWLNTSE YQNIIDILDE IMQLNTLRNE CITENWNLNL |
| 901 | EEFIQKMKEI EKDFDDFKIQ TKKEIFNNYY EDIKNNILTE FKDDINGCDV LEKKLEKIVI |
| 961 | FDDETKFEID KKSNILQDEQ RKLSNINKKD LKKKVDQYIK DKDQEIKSKI LCRIIFNSDF |
| 1021 | LKKYKKEIDN LIEDMESENE NKFQEIYYPK ERKNELYIYK KNLFLNIGNP NFDKIYGLIS |
| 1081 | NDIKMADAKF LFNIDGKNIR KNKISEIDAI LKNLNDKLNG YSKEYKEKYI KKLKENDDFF |
| 1141 | AKNIQNKNYK SFEKDYNRVS EYKKIRDLVE FNYLNKIESY LIDINWKLAI QMARFERDMH |
| 1201 | YIVNGLRELG IIKLSGYNTG ISRAYPKRNG SDGFYTTTAY YKFFDEESYK KFEKICYGFG |
| 1261 | IDLSENSEIN KPENESIRNY ISHFYIVRNP FADYSIAEQI DRVSNLLSYS TRYNNSTYAS |
| 1321 | VFEVFKKDVN LDYDELKKKF KLIGNNDILE RLMKPKKVSV LELESYNSDY IKNLIIELLT |
| 1381 | KIENTNDTL |

[0222] Exemplary Cas13b proteins include, but are not limited to:

| Species | Cas13b Accession | Cas13b Size (aa) |
|---|---|---|
| Paludibacter propionicigenes WB4 | WP_013446107.1 | 1155 |
| Prevotella sp. P5-60 | WP_044074780.1 | 1091 |
| Prevotella sp. P4-76 | WP_044072147.1 | 1091 |
| Prevotella sp. P5-125 | WP_044065294.1 | 1091 |
| Prevotella sp. P5-119 | WP_042518169.1 | 1091 |
| Capnocytophaga canimorsus Cc5 | WP_013997271.1 | 1200 |
| Phaeodactylibacter xiamenensis | WP_044218239.1 | 1132 |
| Porphyromonas gingivalis W83 | WP_005873511.1 | 1136 |
| Porphyromonas gingivalis F0570 | WP_021665475.1 | 1136 |
| Porphyromonas gingivalis ATCC 33277 | WP_012458151.1 | 1136 |
| Porphyromonas gingivalis F0185 | ERJ81987.1 | 1136 |
| Porphyromonas gingivalis F0185 | WP_021677657.1 | 1136 |
| Porphyromonas gingivalis SJD2 | WP_023846767.1 | 1136 |
| Porphyromonas gingivalis F0568 | ERJ65637.1 | 1136 |
| Porphyromonas gingivalis W4087 | ERJ87335.1 | 1136 |
| Porphyromonas gingivalis W4087 | WP_021680012.1 | 1136 |
| Porphyromonas gingivalis F0568 | WP_021663197.1 | 1136 |
| Porphyromonas gingivalis | WP_061156637.1 | 1136 |
| Porphyromonas gulae | WP_039445055.1 | 1136 |
| Bacteroides pyogenes F0041 | ERI81700.1 | 1116 |
| Bacteroides pyogenes JCM 10003 | WP_034542281.1 | 1116 |
| Alistipes sp. ZOR0009 | WP_047447901.1 | 954 |
| Flavobacterium branchiophilum FL-15 | WP_014084666.1 | 1151 |
| Prevotella sp. MA2016 | WP_036929175.1 | 1323 |
| Myroides odoratimimus CCUG 10230 | EHO06562.1 | 1160 |
| Myroides odoratimimus CCUG 3837 | EKB06014.1 | 1158 |
| Myroides odoratimimus CCUG 3837 | WP_006265509.1 | 1158 |
| Myroides odoratimimus CCUG 12901 | WP_006261414.1 | 1158 |
| Myroides odoratimimus CCUG 12901 | EHO08761.1 | 1158 |
| Myroides odoratimimus (NZ_CP013690.1) | WP_058700060.1 | 1160 |
| Bergeyella zoohelcum ATCC 43767 | EKB54193.1 | 1225 |
| Capnocytophaga cynodegmi | WP_041989581.1 | 1219 |
| Bergeyella zoohelcum ATCC 43767 | WP_002664492.1 | 1225 |
| Flavobacterium sp. 316 | WP_045968377.1 | 1156 |
| Psychroflexus torquis ATCC 700755 | WP_015024765.1 | 1146 |
| Flavobacterium columnare ATCC 49512 | WP_014165541.1 | 1180 |
| Flavobacterium columnare | WP_060381855.1 | 1214 |
| Flavobacterium columnare | WP_063744070.1 | 1214 |
| Flavobacterium columnare | WP_065213424.1 | 1215 |
| Chryseobacterium sp. YR477 | WP_047431796.1 | 1146 |
| Riemerella anatipestifer ATCC 11845 = DSM | WP_004919755.1 | 1096 |
| 15868 | | |
| Riemerella anatipestifer RA-CH-2 | WP_015345620.1 | 949 |
| Riemerella anatipestifer | WP_049354263.1 | 949 |
| Riemerella anatipestifer | WP_061710138.1 | 951 |
| Riemerella anatipestifer | WP_064970887.1 | 1096 |
| Prevotella saccharolytica F0055 | EKY00089.1 | 1151 |
| Prevotella saccharolytica JCM 17484 | WP_051522484.1 | 1152 |
| Prevotella buccae ATCC 33574 | EFU31981.1 | 1128 |
| Prevotella buccae ATCC 33574 | WP_004343973.1 | 1128 |
| Prevotella buccae D17 | WP_004343581.1 | 1128 |
| Prevotella sp. MSX73 | WP_007412163.1 | 1128 |
| Prevotella pallens ATCC 700821 | EGQ18444.1 | 1126 |
| Prevotella pallens ATCC 700821 | WP_006044833.1 | 1126 |
| Prevotella intermedia ATCC 25611 = DSM 20706 | WP_036860899.1 | 1127 |
| Prevotella intermedia | WP_061868553.1 | 1121 |
| Prevotella intermedia 17 | AFJ07523.1 | 1135 |
| Prevotella intermedia | WP_050955369.1 | 1133 |
| Prevotella intermedia | BAU18623.1 | 1134 |
| Prevotella intermedia ZT | KJJ86756.1 | 1126 |
| Prevotella aurantiaca JCM 15754 | WP_025000926.1 | 1125 |
| Prevotella pleuritidis F0068 | WP_021584635.1 | 1140 |
| Prevotella pleuritidis JCM 14110 | WP_036931485.1 | 1117 |
| Prevotella falsenii DSM 22864 = JCM 15124 | WP_036884929.1 | 1134 |
| Porphyromonas gulae | WP_039418912.1 | 1176 |
| Porphyromonas sp. COT-052 OH4946 | WP_039428968.1 | 1176 |
| Porphyromonas gulae | WP_039442171.1 | 1175 |
| Porphyromonas gulae | WP_039431778.1 | 1176 |
| Porphyromonas gulae | WP_046201018.1 | 1176 |
| Porphyromonas gulae | WP_039434803.1 | 1176 |
| Porphyromonas gulae | WP_039419792.1 | 1120 |
| Porphyromonas gulae | WP_039426176.1 | 1120 |
| Porphyromonas gulae | WP_039437199.1 | 1120 |
| Porphyromonas gingivalis TDC60 | WP_013816155.1 | 1120 |
| Porphyromonas gingivalis ATCC 33277 | WP_012458414.1 | 1120 |
| Porphyromonas gingivalis A7A1-28 | WP_058019250.1 | 1176 |
| Porphyromonas gingivalis JCVI SC001 | EOA10535.1 | 1176 |
| Porphyromonas gingivalis W50 | WP_005874195.1 | 1176 |
| Porphyromonas gingivalis | WP_052912312.1 | 1176 |
| Porphyromonas gingivalis AJW4 | WP_053444417.1 | 1120 |
| Porphyromonas gingivalis | WP_039417390.1 | 1120 |
| Porphyromonas gingivalis | WP_061156470.1 | 1120 |

[0223] Exemplary wild type Bergeyella zoohelcum ATCC 43767 Cas13b (BzCas13b) proteins of the disclosure may comprise or consist of the amino acid sequence:

| (SEQ ID NO: 191) | |
|---|---|
| 1 | menktslgnn iyynpfkpqd ksyfagyfna amentdsvfr elgkrlkgke ytsenffdai |
| 61 | fkenislvey eryvkllsdy fpmarlldkk evpikerken fkknfkgiik avrdlrnfyt |
| 121 | hkehgeveit deifgvldem lkstvltvkk kkvktdktke ilkksiekql dilcqkkley |
| 181 | lrdtarkiee krrnqrerge kelvapfkys dkrddliaai yndafdvyid kkkdslkess |
| 241 | kakyntksdp qqeegdlkip iskngvvfll slfltkqeih afkskiagfk atvideatvs |
| 301 | eatvshgkns icfmatheif shlaykklkr kvrtaeinyg eaenaeqlsv yaketlmmqm |
| 361 | ldelskvpdv vyqnlsedvq ktfiedwney lkenngdvgt meeeqvihpv irkryedkfn |
| 421 | yfairfldef aqfptlrfqv hlgnylhdsr pkenlisdrr ikekitvfgr lselehkkal |
| 481 | fikntetned rehyweifpn pnydfpkeni svndkdfpia gsildrekqp vagkigikvk |
| 541 | llnqqyvsev dkavkahqlk qrkaskpsiq niieeivpin esnpkeaivf ggqptaylsm |
| 601 | ndihsilyef fdkwekkkek lekkgekelr keigkelekk ivgkiqaqiq qiidkdtnak |
| 661 | ilkpyqdgns taidkeklik dlkqeqnilq klkdeqtvre keyndfiayq dknreinkvr |
| 721 | drnhkqylkd nlkrkypeap arkevlyyre kgkvavwlan dikrfmptdf knewkgeqhs |
| 781 | llqkslayye qckeelknll pekvfqhlpf klggyfqqky lyqfytcyld krleyisglv |
| 841 | qqaenfksen kvfkkvenec fkflkkqnyt hkeldarvqs ilgypifler gfmdekptii |
| 901 | kgktfkgnea lfadwfryyk eyqnfqtfyd tenyplvele kkqadrkrkt kiyqqkkndv |
| 961 | ftllmakhif ksvfkqdsid qfsledlyqs reerlgnqer arqtgerntn yiwnktvdlk |
| 1021 | lcdgkitven vklknvgdfi kyeydqrvqa flkyeeniew qaflikeske eenypyvver |
| 1081 | eieqyekvrr eellkevhli eeyilekvkd keilkkgdnq nfkyyilngl lkqlknedve |
| 1141 | sykvfnlnte pedvninqlk qeatdleqka fvltyirnkf ahnqlpkkef wdycqekygk |
| 1201 | iekektyaey faevfkkeke alik. |

[0224] In some embodiments of the compositions of the disclosure, the sequence encoding the first RNA binding protein, or RNA-guided target RNA binding protein, comprises a sequence isolated or derived from a CasRX/Cas13d protein. CasRX/Cas13d is an effector of the type VI-D CRISPR-Cas systems. In some embodiments, the CasRX/Cas13d protein is an RNA-guided RNA endonuclease enzyme that can cut or bind RNA. In some embodiments, the CasRX/Cas13d protein can include one or more higher eukaryotes and prokaryotes nucleotide-binding (HEPN) domains. In some embodiments, the CasRX/Cas13d protein can include either a wild-type or mutated HEPN domain. In some embodiments, the CasRX/Cas13d protein includes a mutated HEPN domain that cannot cut RNA but can process guide RNA. In some embodiments, the CasRX/Cas13d protein does not require a protospacer flanking sequence.

[0225] Exemplary CasRX/Cas13d proteins may comprise or consist of the sequence:

| CasRX/Cas13d Gut_metagenome_contig6049000251: | |
|---|---|
| (SEQ ID NO: 54) | |
| LYLTSFGKGN AAVIEQKIEP ENGYRVTGMQ ITPSITVNKA TDESVRFRVK RKIAQKDEFI | 60 |
| ADNPMHEGRH RIEPSAGSDM LGLKTKLEKY YFGKEFDDNL HIQIIYNILD IEKILAVYST | 120 |
| NITA. | 124 |

[0226] Exemplary CasRX/Cas13d proteins may comprise or consist of the sequence:

| CasRX/Cas13d Gut_metagenome_contig546000275: | |
|---|---|
| (SEQ ID NO: 57) | |
| MDSYRPKLYK LIDFCIFKHY HEYTEISEKN VDTLRAAVSE EQKESFYADE AKRLWGIFDK | 60 |
| QFLGFCKKIN VWVNGSHEKE ILGYIDKDAY RKKSDVSYFS KFLYAMSFFL DGKEINDLLT | 120 |
| TLINKFDNIA SFISTAKELD AEIDRILEKK LDPVTGKPLK GKNSFRNFIA NNVIENKRFI | 180 |
| YVIKFCNPKN VLKLVKNTKV TEFVLKRMPE SQIDRYYSSC IDTEKNPSVD KKISDLAEMI | 240 |
| KKIAFDDFRN VRQKTRTREE SLEKERFKAV IGLYLTVVYL LIKNLVNVNS RYVMAFHCLE | 300 |
| RDAKLYGINI GKNYIELTED LCRENENSRS AYLARNKRLR DCVKQNIDNA KNMKSKEK. | 358 |

[0227] Exemplary CasRX/Cas13d proteins may comprise or consist of the sequence:

| CasRX/Cas13d Gut_metagenome_contig4114000374: | |
|---|---|
| (SEQ ID NO: 61) | |
| DTKINPQTWL YQLENTPDLD NEYRDTLDHF FDERFNEINE HFVTQNATNL CIMKEVFPDE | 60 |
| DFKSIADLYY DFIVVKSYKN IGFSIKKLRE KMLELPEAKR VTSTEMDSVR SKLYKLIDFC | 120 |
| IFKHYHEKPE TVEMIVSMLR AYTSEDMKE. | 149 |

[0228] Exemplary CasRX/Cas13d proteins may comprise or consist of the sequence:

| CasRX/Cas13d Gut_metagenome_contig721000619: | |
|---|---|
| (SEQ ID NO: 67) | |
| KEGSTMAKNE KKKSTAKALG LKSSFVVNND IYMTSFGKGN KAVLEKKITE NTIENKSDTT | 60 |
| YFDVINRDPK GFTLEGRRIA DMTAFSNDPK YHVNVVNGKF LEDQLGARSE LEKKVFGRTF | 120 |
| DDNVHIQLIH NILDIEKIMA QYVSDIVYLL HNTIKRDMND DIMGYISIRN SFDDFCHPER | 180 |
| IPDRKAKDNL QKQHDIFFDE ILKCGRLAYF GNAFFEDGSD NKEIAKLKRY KEIYHIIALM | 240 |
| GSLRQSYFHG ENSDKNFQGP TWAYTLESNL TGKYKEFKDT LDKTFDERYE MISKDFGSTN | 300 |
| MVNLQILEEL LKMLYGNVSP. | 320 |

[0229] Exemplary CasRX/Cas13d proteins may comprise or consist of the sequence:

| CasRX/Cas13d Gut_metagenome_contig2002000411: | |
|---|---|
| (SEQ ID NO: 69) | |
| EKQNKAKYQA IISLYLMVMY QIVKNMIYVN SRYVIAFHCL ERDSNQLLGR FNSRDASMYN | 60 |
| KLTQKFITDK YLNDGAQGCS KKVGNYLSHN ITCCSDELRK EYRNQVDHFA VVRMIGKYAA | 120 |
| DIGKFSTWFE LYHYVMQRII FDKRNPLSET ERTYKQLIAK HHTYCKDLVK ALNTPFGYNL | 180 |
| ARYKNLSIGE LFDRNNYNAK TKET. | 204 |

[0230] Exemplary CasRX/Cas13d proteins may comprise or consist of the sequence:

| CasRX/Cas13d Gut_metagenome_contig13552000311: | |
|---|---|
| (SEQ ID NO: 71) | |
| LIDFLIYDLY YNRKPARIEE IVDKLRESVN DEEKESIYSA ETKYVYEALG KVLVRSLKKY | 60 |
| LNGATIRDLK NRYDAKTANR IWDISEHSKS GHVNCFCKLI YMMTLMLDGK EINDLLTTLV | 120 |
| NKFDNIASFI DVMDELGLEH SFTDNYKMFA DSKAICLDLQ FINSFARMSK IDDEKSKRQL | 180 |
| FRDALVVLDI GDKNEDWIEK YLTSDIFKRD ENGNKIDGEK RDFRNFIANN VIKSARFKYL | 240 |
| VKYSSADGMI KLKKNEKLIS FVLEQLPETQ IDRYYESCGL DCAVADRKVR IEKLTGLIRD | 300 |
| MRFDNFRGVN YSNDACKKDK QAKAKYQAII SLYLMVLYQI VKNMIYVNSR YVIAFHCLER | 360 |
| DLLFFNIELD NSYQYSNCNE LTEKFIKDKY MKEGALGFNM KAGRYLTKNI GNCSNELRKI | 420 |
| YRNQVDHFAV VRKIGNYAAD IASVGSWFE. | 449 |

[0231] Exemplary CasRX/Cas13d proteins may comprise or consist of the sequence:

| CasRX/Cas13d Gut_metagenome_contig10037000527: | |
|---|---|
| (SEQ ID NO: 72) | |
| YMDQNFANSD AWAIHVYRNK IQHLDAVRHA DMYIGDIREF HSWFELYHYI IQRRIIDQYA | 60 |
| YESTPGSSRD GSAIIDEERL NPATRRYFRL ITTYKT. | 96 |

[0232] Exemplary CasRX/Cas13d proteins may comprise or consist of the sequence:

| CasRX/Cas13d Gut_metagenome_contig238000329: | |
|---|---|
| (SEQ ID NO: 73) | |
| RYDKDRSKIY TMMDFVIYRY YIDNNNDSID FINKLRSSID EKSKEKLYNE EANRLWNKLK | 60 |
| EYMLYIKEFN GKLASRTPDR DGNISEFVES LPKIHRLLPR GQKISNFSKL MYLLTMFLDG | 120 |
| KEINDLLTTL INKFENIQGF LDIMPEINVN AKFEPEYVFF NKSHEIAGEL KLIKGFAQMG | 180 |
| EPAATLKLEM TADAIKILGT EKEDAELIKL AESLFKDENG KLLGNKQHGM RNFIGNNVIK | 240 |
| SKRFHYLIRY GDPAHLHKIA TNKNVVRFVL GRIADMQKKQ GQKGKNQIDR YYEVCVGNKD | 300 |
| IKKTIEEKID ALTDIIVNMN YDQFEKKKAV IENQNRGKTF EEKNKYKRDN AEREKFKKII | 360 |
| SLYLTVIYHI LKNIVNVNSR YILGFHCLER DKQLYIEKYN KDKLDGFVAL TKFCLGDEER | 420 |
| YEDLKAKAQA SIQALETANP KLYAKYMNYS DEEKKEEFKK QLNRERVKNA RNAYLKNIKN | 480 |
| YIMIRLQLRD QTDSSGYLCG EFRDKVAHLE VARHAHEYI. | 519 |

[0233] Exemplary CasRX/Cas13d proteins may comprise or consist of the sequence:

| CasRX/Cas13d Gut_metagenome_contig2643000492: | |
|---|---|
| (SEQ ID NO: 84) | |
| NGEIVSLAEK EAFSAKIADK NIGCKIENKQ FRHPKGYDVI ADNPIYKGSP RQDMLGLKET | 60 |
| LEKRYFSPSD SIDNVRVQVA HNILDIEKIL AEYITNAVYS FDNIAGFGKD IIGDDFSPVY | 120 |
| TYDKFEKSDR YEYFKNLLNN SRLGYYGQAF FECDDSKENK KKKDAIKCYN IIALLSGLRH | 180 |
| W. | 181 |

[0234] Exemplary CasRX/Cas13d proteins may comprise or consist of the sequence:

| CasRX/Cas13d Gut_metagenome_contig874000057: | |
|---|---|
| (SEQ ID NO: 85) | |
| MSKNKESYAK GMGLKSALVS GSKVYMTSFE GGNDAKLEKV VENSEIVSLA EKESFSAEIF | 60 |
| KKNIGCKIEN KKFKHPKRYD VIADNPLYKG SVRQDMLGLK ETLEKRYFNS ADGTDNVCIQ | 120 |
| VIHNILDIEK ILAEYITNAV YSFDNIAGFG EDIIGMGGFK PIYTYKQFKE PDKYNKKFDD | 180 |
| ILNNSRLGYY GKAFFEKNDL KHNPNKKKRD KNPYILKYDN ECYYIIALLS GLRHWNIHSH | 240 |
| AKDDLVSYRW LYNLDSILNR EYISTLNYLY DDIADELTES FSKNSSANVN YIAETLNIDP | 300 |
| SEFAQQYFRF SIMKEQKNMG FNVSKLREIM LDRKELSDIR DNHRVFDSIR SKLYTMMDFV | 360 |
| IYRYYIEEAA KTEAENRNLP ENEKKISEKD FFVINLRGSF DENQKEKLYI EEAKRLWEKL | 420 |
| KDIMLKIKEF RGEKVKEYKK. | 440 |

[0235] Exemplary CasRX/Cas13d proteins may comprise or consist of the sequence:

| CasRX/Cas13d Gut_metagenome_contig4781000489: | |
|---|---|
| (SEQ ID NO: 86) | |
| LDKQLDYEYI RTLNYMFNDI ADELTRTFSK NSAANVNYIA ETLNIDPNKF AEQYFRFSIM | 60 |
| KEQKNLGFNL TKLRESMLDR RELSDIRDNH NVFDSIRPKL YTMMDFVIYK HYIDEAKKTE | 120 |
| AENKSLPDDR KNLSEKD. | 137 |

[0236] Exemplary CasRX/Cas13d proteins may comprise or consist of the sequence:

| CasRX/Cas13d Gut_metagenome_contig12144000352: | |
|---|---|
| (SEQ ID NO: 87) | |
| RMGEPVANTK RVMMIDAVKI LGTDLSDDEL KEMADSFFKD SDGNLLKKGK HGMRNFITNN | 60 |
| VIKNKRFHYL IRYGDPAHLH EIAKNEA. | 87 |

[0237] Exemplary CasRX/Cas13d proteins may comprise or consist of the sequence:

| CasRX/Cas13d Gut_metagenome_contig5590000448: | |
|---|---|
| (SEQ ID NO: 88) | |
| VHNNEEKDLI KYTWLYNLDK YLDAEYITTL NYMYNDIGDE LTDSFSKNSA ANINYIAETL | 60 |
| GIDPKTFAEQ YFRFSIMKEQ KNLGFNLTKL REVMLDRKDM SEIRENHNDF DSIRAKVYTM | 120 |
| MDFVIYRYYI EEAAKVNAAN KSLPDNEKSL SEKDIFVISL RGSFNEDQKD RLYYDEAQRL | 180 |
| WSKVGKLMLK IKKFRGKDTR KYKNMGTPRI RRLIPEGRDI STFSKLMYAL TMFLDGKEIN | 240 |
| DLLTTLINKF DNIQSFLKVM PLIGVNAKFA EEYSFFNNSE KIADELRLIK SFARMGEPVA | 300 |
| DARRAMYIDA IRILGTDLSD DELKALADSF SLDENGNKLG KGKHGMRNFI INNVITNKRF | 360 |
| HYLIRYGNPV HLHEIAKNEA VVKFVLGRIA DIQKKQGQNG KNQIDRYYET CIGK. | 414 |

[0238] Exemplary CasRX/Cas13d proteins may comprise or consist of the sequence:

| CasRX/Cas13d Gut_metagenome_contig525000349: | |
|---|---|
| (SEQ ID NO: 89) | |
| MSKKENRKSY VKGLGLKSTL VSDSKVYLTT FADGSNAKLE KCVENNKIIC ISNDKEAFAA | 60 |
| SIANKNVGYK IKNDEKFRHP KGYDIISNNP LLHNNSVQQD MLGLKNVLEK RYFGKSSGGD | 120 |
| NNLCIQIIHN IIDIEKILSE YIPNVVYAFN NIAGFKDEHN NIIDIIGTQT YNSSYTYADF | 180 |
| SKDKSDKKYI EFQKLLKNKR LGYWGKAFFT GQGNNAKVRQ ENQCFHIIAL LISLRNWATH | 240 |
| SNELDKHTKR TWLYKLDDTN ILNAEYVKTL NYLYDTIADE LTKSFSKNGA VNVNYLAKKY | 300 |
| NIKDDLPGFS EQYFRFSIMK EQKNLGFNIS KLRENMLDFK DMSVI. | 345 |

[0239] Exemplary CasRX/Cas13d proteins may comprise or consist of the sequence:

| CasRX/Cas13d Gut_metagenome_contig7229000302: | |
|---|---|
| (SEQ ID NO: 90) | |
| KKISSLTKFC LGESDEKKLK ALAKKSLEEL KTTNSKLYEN YIKYSDERKA EEAKRQINRE | 60 |
| RAKTAMNAHL RNTKWNDIMY GQLKDLADSK SRICSEFRNK AAHLEVARYA HMYINDISEV | 120 |
| KSYFRLYHYI MQRRIIDVIE NNPKAKYEGK VKVYFEDVKK NKKYNKNLLK LMCVPFGYCI | 180 |
| PRFKNLSIEQ MFDMNETDNS DKKKEK. | 206 |

[0240] Exemplary CasRX/Cas13d proteins may comprise or consist of the sequence:

| CasRX/Cas13d Gut_metagenome_contig3227000343: | |
|---|---|
| (SEQ ID NO: 91) | |
| IGDISEVNSY FQLYHYIMQR ILIDKIGSKT TGKAKEYFDS VIVNKKYDDR LLKLLCSPLG | 60 |
| YCLTRYKDLS IEALFDMNEA AKYDKLNKER KNKKK. | 95 |

[0241] Exemplary CasRX/Cas13d proteins may comprise or consist of the sequence:

| CasRX/Cas13d Gut_metagenome_contig7030000469: | |
|---|---|
| (SEQ ID NO: 92) | |
| SIRSKLYTMM DFVIYRYYIE ESAKAAAENK PSESDSFVIR LRGSFNENQK EELYIEEAER | 60 |
| LWKKFGEIML KIKEFRGEKV KEYKKEVPRI ERILPHGKDI SAFSKLMYML SMFLD. | 115 |

[0242] Exemplary CasRX/Cas13d proteins may comprise or consist of the sequence:

| CasRX/Cas13d gut_metagenome_P17E0k2120140920, _c87000043: | |
|---|---|
| (SEQ ID NO: 93) | |
| MYFSKMIYML TYFLDGKEIN DLLTTLISKF DNIKEFLKIM KSSAVDVECE LTAGYKLFND | 60 |
| SQRITNELFI VKNIASMRKP AASAKLTMFR DALTILGIDD KITDDRISEI LKLKEKGKGI | 120 |
| HGLRNFITNN VIESSRFVYL IKYANAQKIR EVAKNEKVVM FVLGGIPDTQ IERYYKSCVE | 180 |
| FPDMNSSLEA KRSELARMIK NISFDDFKNV KQQAKGRENV AKERAKAVIG LYLT. | 234 |

[0243] Exemplary CasRX/Cas13d proteins may comprise or consist of the sequence:

| CasRX/Cas13d Metagenomic hit (no protein accession): contig | |
|---|---|
| emb\|OBVH01003037.1, human gut metagenome sequence (also | |
| found in WGS contigs emb\|OBXZ01000094.1\|and | |
| emb\|OBJF01000033.1\|): | |
| (SEQ ID NO: 94) | |
| MAKKKRITAK ERKQNHRELL MKKADSNAEK EKAKKPVVEN KPDTAISKDN TPKPNKEIKK | 60 |
| SKAKLAGVKW VIKANDDVAY ISSFGKGNNS VLEKRIMGDV SSNVNKDSHM YVNPKYTKKN | 120 |
| YEIKNGFSSG SSLVTYPNKP DKNSGMDALC LKPYFEKDFF GHIFTDNMHI QAIYNIFDIE | 180 |
| KILAKHITNI IYTVNSFDRN YNQSGNDTIG FGLNYRVPYS EYGGGKDSNG EPKNQSKWEK | 240 |
| RDNFIKFYNE SKPHLGYYEN IFYDHGEPIS EEKFYNYLNI LNFIRNNTFH YKDDDIELYS | 300 |
| ENYSEEFVFI NCLNKFVKNK FKNVNKNFIS NEKNNLYIIL NAYGKDTENV EVVKKYSKEL | 360 |
| YKLSVLKTNK NLGVNVKKLR ESAIEYGYCP LPYDKEKEVA KLSSVKHKLY KTYDFVITHY | 420 |
| LNSNDKLLLE IVETLRLSKN DDEKENVYKK YAEKLFKADD VINPIKAISK LFARKGNKLF | 480 |
| KEKIIIKKEY IEDVSIDKNI YDFTKVIFFM TCFLDGKEIN DLLTNIISKL QVIEDHNNVI | 540 |
| KFISNNKDAV YKDYSDKYAI FRNAGKIATE LEAIKSIARM ENKIENAPQE PLLKDALLSL | 600 |
| GVSDDTKVLE NTYNKYFDSK EKTDKQSQKV STFLMNNVIN NNRFKYVIKY INPADINGLA | 660 |
| KNRYLVKFVL SKIPEEQIDS YYKLFSNEEE PGCEEKIKLL TKKISKLNFQ TLFENNKIPN | 720 |
| VEKEKKKAII TLYFTIVYIL VKNLVNINGL YTLALYFVER DGYFYKDICG KKDKKKSYND | 780 |
| VDYLLLPEIF SGSKYREETK NLKLPKEKDR DIMKKYLPND KDREKYNKFF TAYRNNIVHL | 840 |
| NIIAKLSELT KNIDKDINSY FDIYHYCTQR VMFNYCKEKN DVVLAKMKDL AHIKSDCNEF | 900 |
| SSKHTYPFSS AVLRFMNLPF AYNVPRFKNL SYKKFFDKQ. | 939 |

[0244] Exemplary CasRX/Cas13d proteins may comprise or consist of the sequence:

| CasRX/Cas13d Metagenomic hit (no protein accession): contig | |
|---|---|
| tpg\|DJXD01000002.1\| (uncultivated Ruminococcus assembly, | |
| UBA7013, from sheep gut metagenome): | |
| (SEQ ID NO: 95) | |
| MKKQKSKKTV SKTSGLKEAL SVQGTVIMTS FGKGNMANLS YKIPSSQKPQ NLNSSAGLKN | 60 |
| VEVSGKKIKF QGRHPKIATT DNPLFKPQPG MDLLCLKDKL EMHYFGKTFD DNIHIQLIYQ | 120 |
| ILDIEKILAV HVNNIVFTLD NVLHPQKEEL TEDFIGAGGW RINLDYQTLR GQTNKYDRFK | 180 |
| NYIKRKELLY FGEAFYHENE RRYEEDIFAI LTLLSALRQF CFHSDLSSDE SDHVNSFWLY | 240 |
| QLEDQLSDEF KETLSILWEE VTERIDSEFL KTNTVNLHIL CHVFPKESKE TIVRAYYEFL | 300 |
| IKKSFKNMGF SIKKLREIML EQSDLKSFKE DKYNSVRAKL YKLFDFIITY YYDHHAFEKE | 360 |
| ALVSSLRSSL TEENKEEIYI KTARTLASAL GADFKKAAAD VNAKNIRDYQ KKANDYRISF | 420 |
| EDIKIGNTGI GYFSELIYML TLLLDGKEIN DLLTTLINKF DNIISFIDIL KKLNLEFKFK | 480 |
| PEYADFFNMT NCRYTLEELR VINSIARMQK PSADARKIMY RDALRILGMD NRPDEEIDRE | 540 |
| LERTMPVGAD GKFIKGKQGF RNFIASNVIE SSRFHYLVRY NNPHKTRTLV KNPNVVKFVL | 600 |
| EGIPETQIKR YFDVCKGQEI PPTSDKSAQI DVLARIISSV DYKIFEDVPQ SAKINKDDPS | 660 |
| RNFSDALKKQ RYQAIVSLYL TVMYLITKNL VYVNSRYVIA FHCLERDAFL HGVTLPKMNK | 720 |
| KIVYSQLTTH LLTDKNYTTY GHLKNQKGHR KWYVLVKNNL QNSDITAVSS FRNIVAHISV | 780 |
| VRNSNEYISG IGELHSYFEL YHYLVQSMIA KNNWYDTSHQ PKTAEYLNNL KKHHTYCKDF | 840 |
| VKAYCIPFGY VVPRYKNLTI NELFDRNNPN PEPKEEV. | 877 |

[0245] An exemplary direct repeat sequence of CasRX/Cas13d Metagenomic hit (no protein accession): contig tpg|DJXD01000002.1| (uncultivated Ruminococcus assembly, UBA7013, from sheep gut metagenome) (SEQ ID NO: 95) comprises or consists of the nucleic acid sequence:

CasRX/Cas13d DR:

(SEQ ID NO: 96)

| | |
|---|---|
| caactacaac cccgtaaaaa tacggggttc tgaaac. | 36 |

[0246] Exemplary CasRX/Cas13d proteins may comprise or consist of the sequence:

| CasRX/Cas13d Metagenomic hit (no protein accession): contig | |
|---|---|
| OGZC01000639.1 (human gut metagenome assembly): | |
| (SEQ ID NO: 97) | |
| MKKKNIRATR EALKAQKIKK SQENEALKKQ KLAEEAAQKR REELEKKNLA QWEETSAEGR | 60 |
| RSRVKAVGVK SVFVVGDDLY LATFGNGNET VLEKKITPDG KITTFPEEET FTAKLKFAQT | 120 |
| EPTVATSIGI SNGRIVLPEI SVDNPLHTTM QKNTIKRSAG EDILQLKDVL ENRYFDRSFN | 180 |
| DDLHIRLIYN ILDIEKILAE YTTNAVFAID NVSGCSDDFL SNFSTRNQWD EFQNPEQHRE | 240 |
| HFGNKDNVIC SVKKQQDLFF NFFKNNRIGY FGKAFFHAES ERKIVKKTEK EVYHILTLIG | 300 |
| SLRQWITHST EGGISRLWLY QLEDALSREY QETMNNCYNS TIYGLQKDFE KTNAPNLNFL | 360 |
| AEILGKNASE LAEPYFRFII TKEYKNLGFS IKTLREMLLD QPDLQEIREN HNVYDSIRSK | 420 |
| LYKMIDFVLV YAYSNERKSK ADALASNLRS AITEDAKKRI YQNEADQLWT SYQELFKRIR | 480 |
| GFKGAQVKEY SSKNMPIPIQ KQIQNILKPA EQVTYFTKLM YLLTMFLDGK EINDLLTTLI | 540 |
| NKFDNISSLL KTMEQLELQT TFKEDYTFFQ QSSRLCKEIT QLKSFARMGN PISNLKEVMM | 600 |
| VDAIQILGTE KSEQELQSMA CFFFRDKNGK KLNTGEHGMR NFIGNNVISN TRFQYLIRYG | 660 |
| NPQKLHTLSQ NETVVRFVLS RIAKNQRVQG MNGKNQIDRY YETCGGTNSW SVSEEEKINF | 720 |
| LCKILTNMSY DQFQDVKQSG AEITAEEKRK KERYKAIISL YLTVLYQLIK NLVNINARYI | 780 |
| IAFHCLERDA ILYSSKFNTS INLKKRYTAL TEMILGYETD EKARRKDTRT VYEKAEAAKN | 840 |
| RHLKNVKWNC KTRENLENAD KNAIVAFRNI VAHLWIIRDA DRFITGMGAM KRYFDCYHYL | 900 |
| LQRELGYILE KSNQGSEYTK KSLEKVQQYH SYCKDFLHML CLPFAYCIPR YKNLSIAELF | 960 |
| DRHEPEAEPK EEASSVNNSQ FITT. | 984 |

[0247] Exemplary CasRX/Cas13d proteins may comprise or consist of the sequence:

| CasRX/Cas13d Metagenomic hit (no protein accession): contig | |
|---|---|
| emb\|OHBM01000764.1 (human gut metagenome assembly): | |
| (SEQ ID NO: 98) | |
| XXXXXXXXXX XXXXXXXXXX XXXXXXXXXX XXXXXXXXXX XXXXXXXXXX XXXXXXXXXX | 60 |
| XXXXXXXXXX XXXXXXXXXX XXXXXXXXXX XXXXXXXXXX XXXXXXXXXX XXXXXXXXXX | 120 |
| XXXXXXXXXX XXXXXXXXXX XXXXXXXXXX XXXXXXXXXX XXXXXXXXXX XXXXXXXXXX | 180 |
| XXXXXXXXXX XXXXXXXXXX XXXXXXXXXX XXXXXXXXXX XXHPLQKRYR YLTSTNLKSF | 240 |
| ETYKNNLVNK KKFDLDRVKK IPQLAYFGSA FYNTPEDTSA KITKTKIKSN EEIYYTFMLL | 300 |
| STARNFSAHY LDRNRAKSSD AEDFDGTSVI MYNLDNEELY KKLYNKKVHM ALTGMKKVLD | 360 |
| ANFNKKVEHL NNSFIKNSAK DFVILCEVLG IKSRDEKTKF VKDYYDFVVR KNYKHLGFSV | 420 |
| KELRELLFAN HDSNKYIKEF DKISNKKFDS VRSRLNRLAD YIIYDYYNKN NAKVSDLVKY | 480 |
| LRAAADDEQK KKIYLNESIN LVKSGILERI KKILPKLNGK IIGNMQPDST ITASMLHNTG | 540 |
| KDWHPISENA HYFTKWIYTL TLFMDGKEIN DLVTTLINKF DNIASFIEVL KSQSVCTHFS | 600 |
| EERKMFIDSA EICSELSAMN SFARMEAPGA SSKRAMFVEA ARILGDNRSK EELEEYFDTL | 660 |
| FDKSASKKEK GFRNFIRNNV VDSNRFKYLT RYTDTSSVKA FSNNKALVKF AIKDIPQEQI | 720 |
| LRYYNSCFGA SERYYNDGMS DKLVEAIGKI NLMQFNGVIQ QADRNMLPEE KKKANAQKEK | 780 |
| YKSIIRLYLT VCYLFFKNLV YVNSRYYSAF YNLEKDRSLF EINGELKPTG KFDEGHYTGL | 840 |
| VKLFIDNGWI NPRASAYLTV NLANSDETAI RTFRNTAEHL EALRNADKYL NDLKQFDSYF | 900 |
| EIYHYITQRN IKEKCEMLKE QTVKYNNDLL KYHGYSKDFV KALCVPFGYN LPRFKNLSID | 960 |
| ALFDKNDKRE KLKKGFED. | 978 |

[0248] Exemplary CasRX/Cas13d proteins may comprise or consist of the sequence:

| CasRX/Cas13d Metagenomic hit (no protein accession): contig | |
|---|---|
| emb\|OHCP01000044.1 (human gut metagenome assembly): | |
| (SEQ ID NO: 99) | |
| MAKKITAKQK REEKERLNKQ KWAKNDSVII VPETKEEIKT GEIQDNNRKR SRQKSQAKAM | 60 |
| GLKAVLSFDN KIAIASFVSS KNAKSSHIER ITDKEGTTIS VNSKMFESSV NKRDINIEKR | 120 |
| ITIEEPQQDG TIKKEEKGVK STTCNPYFKV GGKDYIGIKE IAEEHFFGRA FPNENLRVQI | 180 |
| AYNIFDVQKI LGTFVNNIIY SFYNLSRDEV QSDNDVIGML YSISDYDRQK ETETFLQAKS | 240 |
| LLKQTEAYYA YFDDVFKKNK KPDKNKEGDN SKQYQENLRH NFNILRVLSF LRQICMHAEV | 300 |
| HVSDDEGCTR TQNYTDSLEA LFNISKAFGK KMPELKTLID NIYSKGINAI NDEFVKNGKN | 360 |
| NLYILSKVYP NEKREVLLRE YYNFVVCKEG SNIGISTRKL KETMIAQNMP SLKEENTYRN | 420 |
| KLYTVMNFIL VRELKNCATI REQMIKELRA NMDEEEGRDR IYSKYAKEIY LYVKDKLKLM | 480 |
| LNVFKEEAEG IIIPGKEDPV KFSHGKLDKK EIESFCLTTK NTEDITKVIY FLCKFLDGKE | 540 |
| INELCCAMMN KLDGISDLIE TAKQCGEDVE FVDQFKCLSK CATMSNQIRI VKNISRMKKE | 600 |
| MTIDNDTIFL DALELLGRKI EKYQKDKNGD YVKDEKGKKV YTKDYNNFQD MFFEGKNHRV | 660 |
| RNFVSNNVIK SKWFSYVVRY NKPAECQALM RNSKLVKFAL DELPDSQIEK YYISVFGEKS | 720 |
| SSSNEEMRRE LLKKLCDFSV RGFLDEIVLL SEDEMKQKDK FSEKEKKKSL IRLYLTIVYL | 780 |
| ITKSMVKINT RFSIACATYE RDYILLCQSE KAERAWEKGA TAFALTRKFL NHDKPTFEQY | 840 |
| YTREREISAM PQEKRKELRK ENDQLLKKTH YSKHAYCYIV DNVNNLTGAV ANDNGRGLPC | 900 |
| LSEKNDNANL FLEMRNKIVH LNVVHDMVKY INEIKNITSY YAFFCYVLQR MIIGNNSNEQ | 960 |
| NKFKAKYSKT LQEFGTYSKD LMWVLNLPFA YNLPRYKNLS NEQLFYDEEE RMEKIVGRKN | 1020 |
| DSR. | 1023 |

[0249] Exemplary CasRX/Cas13d proteins may comprise or consist of the sequence:

| CasRX/Cas13d Metagenomic hit (no protein accession): contig | |
|---|---|
| emb\|OGDF01008514.1\|(human gut metagenome assembly): | |
| (SEQ ID NO: 100) | |
| MTETKPKRED IAKTPAAKSR SKAAGLKSTF AVNGSVLLTS FGRGNDAVPE KLITEKAVSE | 60 |
| INTVKPRFSV EKPATSYSSS FGIKSHISAT ADNPLAGRAP VGEDAIHAKE VLEQRVFGKT | 120 |
| FSDDNIHIQL IYNILDIRKI LSTYANNVVF TINSMRRLDE YDREQDYLGY LYTGNSYERL | 180 |
| LDIADKYAVD GEDWRNTAAG ISNDFEKKQF QTINGFWDLL DMIEPYMCYF SEAFFCETTV | 240 |
| KDPDSGRIVP CLEQRSDGDI YNILRILSIV RQTCMHDNAS MRTVMFTLGQ NSVRDRKNGF | 300 |
| DELAELLDYL YDEKIDIVNR DFLRNQKNNI ELLSRIYGSS ADSPERDRLV QNFYDFRVLS | 360 |
| QDKNLGFSIK KLREKLLDSP ALSVVRSKKY DTMRSKIYSL IDFMIYRKFS ENHVAVDDFV | 420 |
| EELRSLLTED EKESAYSRWA ETLINDGFAQ EILVKLLPQT DPAVIGKIKG KKLLNDSIAG | 480 |
| IKLKKDASFF TKIINVLCMF QDGKEINELV SSLVNKFANI QSFVDVMRSQ GIDSGFTADY | 540 |
| AMFAESGRIS RELHILKGIA RMQHSIAGLG DVKIYGSDDK FHGVSRRVYT DAAYILGFGE | 600 |
| RSEDNDGYVD DYVSSKLLGG ADKNLRNFIT NNVIKNRRFL YTVRYMNPKR AKKLVQNDAL | 660 |
| VVLALSGIPE TQIDRYYKSC IEKRSFNPDL NEKIAALSEM ITTLKIDDFE DVKQNPEKNA | 720 |
| NYEAKKNQRI SKERYKACIG LYLTVLYLIC KNLVKINARY SIAIGCLERD TQLHGVDFKG | 780 |
| AAYMTRDVFI AKGWINPKKP TVKSIKEQYA FLTPYIFTTY RNMIAHLAAV TNAYKYIPQM | 840 |
| DRFKSWFHLY HTVIQHSLIQ QYEYDRDYGR KGAPVVSERV LQLLEQCREH SNYSRDLLHI | 900 |
| LNLPFGYNLP RYLNLSSEKY FDANAI. | 926 |

[0250] Exemplary CasRX/Cas13d proteins may comprise or consist of the sequence:

| CasRX/Cas13d Metagenomic hit (no protein accession): contig | |
|---|---|
| emb\|OGPN01002610.1 (human gut metagenome assembly): | |
| (SEQ ID NO: 101) | |
| MAKKITAKQK REEKERLNKQ KWAKQDTPVV PKSKTEEKPV AASDDKLLKT TQVKKVQTKS | 60 |
| KAKAMGLKTV LSFDDKIAIA SFVNDKKTKL PHIERITDKS GTTIHENARM FDSSVDEQNV | 120 |
| NIEKRMTIEE KQNDGTFKKD EKDVKATICN PYFKTCGKDY IGIKDVAEKY FFGKTFPNEN | 180 |
| LRVQIAYNVF DIQKILGTYV NNIIYSFYNL RRDGKSDVDI IGSLYAFADF DNQLKDKPAF | 240 |
| REAKDLLKNT EAYFSYFGDV FKKSKKGKKD ENNEDYEKNL RHNFNVLRVL SFLRQICTHA | 300 |
| YVKCTGGAKN NGDSTKVEAE SLDALFNITE YFAKTAPELS KTINEIYKEG IDRINNDFVT | 360 |
| NGKNNLYILS KVYPDMQRNE LVKKYYQFVV CKEGNNVGIN TRKLKESIIS QHPWITTPQD | 420 |
| NNKANDYESC RHKLYTIMCF ILVAELDAHE SIRDNMVAEL RANMDGDDGR DAIYEKYAKD | 480 |
| IYHIVKDKLL AMQKVFDEEL VPVKVEGKND PQQFTHGKLG KKEIESFCLS DKNTSDIAKV | 540 |
| VYFLCNFLDG KEINELCCAM MNKFDGIGDL IDTAKQCGEE VKFIEEFACL SNCRKITNDI | 600 |
| RVAKSISKMK NKVNIDNDII YLDAIELLGR KIEKYQKDEN GKILLGTDGK RLYTQEYKYF | 660 |
| NDMFFNAGNH KVRNFIANNV MQSKWFFYVV RYNKPAECQI IMRNKTLVKF TLDDLPDMQI | 720 |
| QRYYSSVFGD NNMPAVDEMR KRLLDKINQF SVRGFLDELD EIVLMSDEES KRNKSSEKEQ | 780 |
| KKSLIRLYLT IAYLITKSMV KINTRFSIAC AMYERDYALL CQSEMKGGPW DGGAQALAVT | 840 |
| RKFLNHDREV FDRYCAREAE IARLPSEERK PLRKANDKLL KQTHYTNHSY TYIVNNLNSF | 900 |
| TDIDYCAKDV GLPAPNDKND NASILGEMRN DIAHLNIVHD MVKYIEELKD ISSYYAFYCY | 960 |
| VLQRRLVGKD PNCQNKFKAK YAKELNDYGT YNKNLMWMLN LPFAYNLPRY KNLSSEFLFY | 1020 |
| DMEYNKKDDE. | 1030 |

[0251] Exemplary CasRX/Cas13d proteins may comprise or consist of the sequence:

| CasRX/Cas13d Metagenomic hit (no protein accession): from contig | |
|---|---|
| emb\|OBLI01020244 and emb\|OBLI01038679 (from pig gut metagenome): | |
| (SEQ ID NO: 102) | |
| MAKKITAKQR REERERQNKQ KWAKKQADAT AVFECEADIK PADSKDEDCT NIYIKREKKK | 60 |
| TQAKAMGLKT VLGFDNKIAI ASFMSSKDSK SSHIERITDP NGKTIREDVR MFDSNVDECS | 120 |
| INLEKRMTVE ERQKDGTIKK DEKDVKSTIC NPYSNECGKD YIGIKSVAEE LFFGRTFPND | 180 |
| NLRVQIAYNI FDIQKILGTY INNIIYSFYN LSRDESQSDN DVIGTLYMLK DFDGQKETDT | 240 |
| FRQARALLER TEAYYSYFDN VFKKIDKNKK KSDDCKRERN EILRYNFNVL RVLSFLRQIC | 300 |
| AHAQVKISNE HDREKGGGLV DSLDALFNIS RFFDAVAPEL NEVINSVYSK GIDDINDNFV | 360 |
| KNGKNNFYIL SKIYPEVARE DLLREYYYFV VSKEGNNIGI STKKLKEAII VQDMSYIKSE | 420 |
| DYDTYRNKLY TVLCFILVKE LNERTTIREQ MVADLRANMN GDIGREDIYS KYAKIIYAQV | 480 |
| KPRFDTMKSA FEEEAKDVIV PDKKKPVKFS HGKLDKNEIE RFCITSANTD SVAKIIYFLC | 540 |
| KFLDGKEINE LCCAMMNKLD GINDLIETAE QCGAKVEFVD KFSVLSNCET ISDQIRIVKS | 600 |
| ISKMKKEIAI DNDTIFLDAL ELLGRKIDKY KKDATGKYLK DENGKYLYSK EYDDFQYMFF | 660 |
| KDSHRVRNFI SNSVIKSKWF SYIVRYNQPS ECRAIMKNKT LVKFALDELP DLQIQRYFVA | 720 |
| LYGDEDLPSY GEMRKILLKK LHDFSIKGFL DEIVLLSDLD MESQDKYCEK EQKKSLFRLY | 780 |
| LTIAYLITKS MVKINTRFSI ACATYERDYA LLCASNKQER AWSSGATALA LTRRFLNQDK | 840 |
| LIFEKHYARE GEISKLPKEE RKAMRKVNDQ LLKRTHFSKH SYCYIVDNVN RLTGGECRTD | 900 |
| KRVLPVLNEK NDNAGILLDF RKTIAHLNVV HKMVDYVDEI KGITSYYAFF CYVLQRMLVG | 960 |
| NNLNEKNAIK EKYSATVKSF GTYSKDFMWL INLPFAYNLP RYKNLSNEQL FYDEEERNET | 1020 |
| EEQIDRL. | 1027 |

[0252] Exemplary CasRX/Cas13d proteins may comprise or consist of the sequence:

CasRX/Cas13d Metagenomic hit (no protein accession):
contig OIZX01000427.1:

(SEQ ID NO: 103)

| | |
|---|---|
| MAKKKKTARQ LREEMQQQRK QAIQKQQEQR QEKAAAARET AAPEQPAAAP VPKRQRKSLA | 60 |
| KAAGLKSNFI LDPQRRTTVM TAFGQGSTAI LEKQIVDRAI SDLQPVQQFQ VEPASAAKYR | 120 |
| LKNSRVRFPN VTADDPLYRR KDGGFVPGMD ALRRKNVLEQ RFFGKSFADN IHIQMIYSIL | 180 |
| DIHKILAAAS GHIVHLLNIV NGSKDRDFIG MLAAHVLYNE LNEEAKRSIA DFCKSPRLIY | 240 |
| YSAAFYETLD NGKSERRSNE DIFNILALMT CLRNFSSHHS IAIKVKDYSA AGLYNLRRLG | 300 |
| PDMKKMLDTF YTEAFIQLNQ SFQDHNTTNL TCLFDILNIS DSARQKQLAE EFYRYVVFKE | 360 |
| QKNLGFSVRK LREEMLLLPD AAVIADKRYD TCRSKLYNLM DFLILRVYRT GRADRCDKLP | 420 |
| EALRAALTDE EKAVVYHKEA LSLWNEMRTL ILDGLLPQMT PENLSRLSGQ KRKGELSLDD | 480 |
| AMLKECLYEP GPVPEDAAPE EANAEYFCRM IYLATLFMDG KEINTLLTTL ISKFENIAAF | 540 |
| LQTMEQLNIE AELGPEYAMF TRSRAVAEQL RVINSFALMK KPQVNAKQQL YRAAVTLLGT | 600 |
| EDPDGVTDEM LCIDPVTGKM LPPNQRHHGD TGLRNFIANN VVESRRFQYL IRYSDPAQLH | 660 |
| QLASNKKLVR FVLSSIPDTQ INRYYETCGQ TRLAGRAAKV EFLTDMIAAI RFDQFRDVNQ | 720 |
| KERGANTQKE RYKAMLGLYQ TVLYLAVKNL VNINARYVMA FHCVERDMFL YDGELTDPKG | 780 |
| ESVSAFLAVN GKKGVQPQYL LLTQLFIRRD YLKRSACEQI QHNMENISDR LLREYRNAVA | 840 |
| HLNVIAHLAD YSADMREITS YYGLYHYLMQ RHLFKRHAWQ IRQPERPTEE EQKLIEQEQK | 900 |
| QLAWEKALFD KTLQYHSYNK DLVKALNAPF GYNLARYKNL SIEPLFSKEA APAAEIKATH | 960 |
| A. | 961 |

[0253] Exemplary CasRX/Cas13d proteins may comprise or consist of the sequence:

| CasRX/Cas13d Metagenomic hit (no protein accession): | |
|---|---|
| contig OCTW011587266.1: | |
| (SEQ ID NO: 104) | |
| MKQNDRENNN KIKKSAAKAV GVKSLARLSD GSTVVSSFGK GAAAELESLI TGGEIRKLSD | 60 |
| KAILEITDDT QNKNAYNVKS SRIPNLTART DKLSDKSGMD DLGFKRELEL EVFGQCFDDS | 120 |
| IHIQIAHAVF DIQKSLAAVI PNVLYTLNNL DRSYSTDNTS DKKDIIGNTL NYQHSYESFN | 180 |
| VEKRGEFTEY YNAAKDRFSY FPDILCVLEK VNGKDRYQPK SEKDAFNVLS SVNMLRNSLF | 240 |
| HFAPKSNDGK ARIAVFKNQF DSDFSHITST VNKIYSAKIA GVNENFLNNE GNNLYIILKA | 300 |
| TNWDIKKIVP QLYRFSVLKS DKNMGFNMRK LREFAVESKN IDLSRLNDKF LTNNRKKLYK | 360 |
| VIDFIIYYHL NKVLKDSFVD DFVAALRASQ SEEEKEKLYA QYSERLFADE GLKSAIKKAV | 420 |
| DMISDTKSNI FKMKTPLDKA LIENIKVNSD ASDFCKLIYV FTRFLDGKEI NILLNSLIKK | 480 |
| FQDIHSFNTT VKKLSENNLI INADYVDDYS LFEQSGTVAR ELMLIKSISK MDFGLDNINL | 540 |
| SFMYDDALRT LGVSDENLPE VKREYFGKTK NLSAYIRNNV LENRRFKYVI KYIHPSDVQK | 600 |
| IACNKAIAGF VLNRMPDTQI KRYYDSLINK GATDIQAQAK ALLDCITGIS FDAIKDDKHL | 660 |
| HKSKEKSPQR SADRERKKAM LTLYYTIVYI FVKQMLHINS LYTIGFFYLE RDQRFIYSRA | 720 |
| KKENKNPSKN SYLNDFRSVT AYFIPSEIMK RIEKNENKGF LEDFEALWNS CGKTSRLRKE | 780 |
| DVLLYARYIS PDHALKNYKM ILNSYRNKIA HINVIMSAGK YTGGIKRMDS YFSVFQHLVQ | 840 |
| CDILSNPNNK GKCFESESLK PLLLDMKFDG TDEKLYSKRL TRALNIPFGY NVPRYKNLTF | 900 |
| EKIYLKSSIN E. | 911 |

[0254] Exemplary CasRX/Cas13d proteins may comprise or consist of the sequence:

| CasRX/Cas13d Metagenomic hit (no protein accession): | |
|---|---|
| contig emb\|OGNF01009141.1: | |
| (SEQ ID NO: 105) | |
| MADIDKKKSS AKAAGLKSTF VLENNKLLMT SFGNGNKAVI EKIIDEKVDS INEPEVFSVT | 60 |
| PCDKKFELQP AKRGLAADSL VDNPLKSKKT AGDDAIHSRK FLERQFFDGN TFNDNIHIQL | 120 |
| IYNILDIEKI LSVHVNDIVY SVNNILSRGE GMEYNDYIGT LNLKSFETYK NNLVNKKKFD | 180 |
| LDRVKKIPQL AYFGSAFYNT PEDTSAKITK TKIKSNEEIY YTFMLLSTAR NFSAHYLDRN | 240 |
| RAKSSDAEDF DGTSVIMYNL DNEELYKKLY NKKVHMALTG MKKVLDANFN KKVEHLNNSF | 300 |
| IKNSAKDFVI LCEVLGIKSR DEKTKFVKDY YDFVVRKNYK HLGFSVKELR ELLFANHDSN | 360 |
| KYIKEFDKIS NKKFDSVRSR LNRLADYIIY DYYNKNNAKV SDLVKYLRAA ADDEQKKKIY | 420 |
| LNESINLVKS GILERIKKIL PKLNGKIIGN MQPDSTITAS MLHNTGKDWH PISENAHYFT | 480 |
| KWIYTLTLFM DGKEINDLVT TLINKFDNIA SFIEVLKSQS VCTHFSEERK MFIDSAEICS | 540 |
| ELSAMNSFAR MEAPGASSKR AMFVEAARIL GDNRSKEELE EYFDTLFDKS ASKKEKGFRN | 600 |
| FIRNNVVDSN RFKYLTRYTD TSSVKAFSNN KALVKFAIKD IPQEQILRYY NSCFGASERY | 660 |
| YNDGMSDKLV EAIGKINLMQ FNGVIQQADR NMLPEEKKKA NAQKEKYKSI IRLYLTVCYL | 720 |
| FFKNLVYVNS RYYSAFYNLE KDRSLFEING ELKPTGKFDE GHYTGLVKLF IDNGWINPRA | 780 |
| SAYLTVNLAN SDETAIRTFR NTAEHLEALR NADKYLNDLK QFDSYFEIYH YITQRNIKEK | 840 |
| CEMLKEQTVK YNNDLLKYHG YSKDFVKALC VPFGYNLPRF KNLSIDALFD KNDKREKLKK | 900 |
| GFED. | 904 |

[0255] Exemplary CasRX/Cas13d proteins may comprise or consist of the sequence:

| CasRX/Cas13d Metagenomic hit (no protein accession): | |
|---|---|
| contig emb\|OIEN01002196.1: | |
| (SEQ ID NO: 106) | |
| MERQKRKMKS KSKMAGVKSV FVIGDELLMT SFGDGDDAVL EKDIDENGVV NDCRNPAAYD | 60 |
| AVYGTDSIRV KKTNNNIRAK VNNPLAKSNI RSEESALFRT RVNEYKREQK DKYETLFFGK | 120 |
| TFDDNIHIQL ISKILDIEKT FSVVIGNIVY AINNLSLEQS IDRPIDIFGD KNTQGISLRE | 180 |
| DNDYLKTMLP RCEYLFHNIL NSDSDNNSKM NYNKVNKGKE EKDNRNNENI EKLKKALEVI | 240 |
| KIIRVDSFHG VDGIKGDQKF PRSKYNLAVN YNEEIQKTIS EPFNRKVEEV QQDFYRNSCV | 300 |
| NIDFLKEIMY GSNYTDRGSD SLECSYFNFA ILKQNKNMGF SITSIRECLL DLYELNFESM | 360 |
| QNLRPRANSF CDFLIYDYYC KNESERANLV DCLRSAASEE EKKNIYFQTA ERVKEKFRNA | 420 |
| FNRISRFDAS YIKNSREKNL SGGSSLPKYS FIEGFTKRSK KINDNDEKNA DLFCNMLYYL | 480 |
| AQFLDGKEIN IFLTSIHNIF QNIDSFLKVM KEKGMECKFQ KDFKMFSHAG HVAKKIEIVI | 540 |
| SLAKMKKTLD FYNAQALKDA VTILGVSKKH QYLDMNSYLD FYMFDNRSGA TGKNAGKDHN | 600 |
| LRNFLVSNVI RSRKFNYLSR YSNLAEVKKL AQNPSLVQFV LSRIEPSLIC RYYESSQGIS | 660 |
| SEGITIDEQI KKLTGIIVDM NIDSFENINN GEIGMRYSKA TPQSIERRNQ MRVCVGLYLN | 720 |
| VLYQIEKNLM NVNARYVLAF AFAERDALML NFTLEECKKN KKRSSGGFSF IEMTQFFIDK | 780 |
| KLFKVATEAI KKNVLKYNGN PESLNHIPGE YICKNMEGYH ENTVRNFRNM VAHLTAVARV | 840 |
| PLYISEVTQI DSYYALYHYC MQMNILQGIE QSGKILDNIK LKNALENARV HRTYSKDAVK | 900 |
| YLCLPFAYNI SRYKALTIKD LFDWTEYSCK KDE. | 933 |

[0256] Exemplary CasRX/Cas13d proteins may comprise or consist of the sequence:

| CasRX/Cas13d Metagenomic hit (no protein accession): | |
|---|---|
| contig e-k87_11092736: | |
| (SEQ ID NO: 107) | |
| MKRQKTFAKR IGIKSTVAYG QGKYAITTFG KGSKAEIAVR SADPPEETLP TESDATLSIH | 60 |
| AKFAKAGRDG REFKCGDVDE TRIHTSRSEY ESLISNPAES PREDYLGLKG TLERKFFGDE | 120 |
| YPKDNLRIQI IYSILDIQKI LGLYVEDILH FVDGLQDEPE DLVGLGLGDE KMQKLLSKAL | 180 |
| PYMGFFGSTD VFKVTKKREE RAAADEHNAK VFRALGAIRQ KLAHFKWKES LAIFGANANM | 240 |
| PIRFFQGATG GRQLWNDVIA PLWKKRIERV RKSFLSNSAK NLWVLYQVFK DDTDEKKKAR | 300 |
| ARQYYHFSVL KEGKNLGFNL TKTREYFLDK FFPIFHSSAP DVKRKVDTFR SKFYAILDFI | 360 |
| IYEASVSVAN SGQMGKVAPW KGAIDNALVK LREAPDEEAK EKIYNVLAAS IRNDSLFLRL | 420 |
| KSACDKFGAE QNRPVFPNEL RNNRDIRNVR SEWLEATQDV DAAAFVQLIA FLCNFLEGKE | 480 |
| INELVTALIK KFEGIQALID LLRNLEGVDS IRFENEFALF NDDKGNMAGR IARQLRLLAS | 540 |
| VGKMKPDMTD AKRVLYKSAL EILGAPPDEV SDEWLAENIL LDKSNNDYQK AKKTVNPFRN | 600 |
| YIAKNVITSR SFYYLVRYAK PTAVRKLMSN PKIVRYVLKR LPEKQVASYY SAIWTQSESN | 660 |
| SNEMVKLIEM IDRLTTEIAG FSFAVLKDKK DSIVSASRES RAVNLEVERL KKLTTLYMSI | 720 |
| AYIAVKSLVK VNARYFIAYS ALERDLYFFN EKYGEEFRLH FIPYELNGKT CQFEYLAILK | 780 |
| YYLARDEETL KRKCEICEEI KVGCEKHKKN ANPPYEYDQE WIDKKKALNS ERKACERRLH | 840 |
| FSTHWAQYAT KRDENMAKHP QKWYDILASH YDELLALQAT GWLATQARND AEHLNPVNEF | 900 |
| DVYIEDLRRY PEGTPKNKDY HIGSYFEIYH YIRQRAYLEE VLAKRKEYRD SGSFTDEQLD | 960 |
| KLQKILDDIR ARGSYDKNLL KLEYLPFAYN LPRYKNLTTE ALFDDDSVSG KKRVAEWRER | 1020 |
| EKTREAEREQ RRQR. | 1034 |

[0257] An exemplary direct repeat sequence of CasRX/Cas13d Metagenomic hit (no protein accession): contig e-k87_11092736 (SEQ ID NO: 107) comprises or consists of the nucleic acid sequence:

CasRX/Cas13d Direct repeat 1:

(SEQ ID NO: 108)

| | |
|---|---|
| gtgagaagtc tccttatggg gagatgctac. | 30 |

[0258] Exemplary CasRX/Cas13d proteins may comprise or consist of the sequence:

| CasRX/Cas13d Ga0129306_1000735: | |
|---|---|
| (SEQ ID NO: 109) | |
| MQKQREQQTV TDESERKKKP LKSGAKAAGL KSVFVLSEGK ELLTSFGRGN EAVPEKRVTG | 60 |
| GTIANARTDN KEAFSAALQN KRFEVFGRTA GSSDDPLAVS RAPGQDLIGA KTALEERYFG | 120 |
| RAFADNIHMQ VIYAIQDINK ILAVHANNIV YTLNNLDREA DPETDDFIGS GYLTLKNTFE | 180 |
| TYCDPAALNE REREKVTVSK QHFDAFMQNP RLAYYGNAFF RKLSKAERLA RGREIFDKES | 240 |
| PERRQEILGS RGKNKSVDDE IRALAPEWVK REERDVYSEL VLMSELRQSC FHGQQKNSAR | 300 |
| IFRLDNDLGP GVDGARELLD RLYAEKINDL RSFDKTSASS NFRLLFNAYH ADNEKKKELA | 360 |
| QEFYRFSVLK VSKNTGFSIR TLREKIIEDH AAQYRDKIYD SMRKKLFSTF DFFLWRFYEE | 420 |
| REDEAEELRA CLRAARSDEE KEQIYAEAAA SCWPSVKPFV ESVAATLCDV VKGRTKLNKL | 480 |
| KLSADESTLV RNAIDGVRIS PRASYFTKLI YLMTLFLDGK EINDLLTTLI HAFENIDSFL | 540 |
| SVLGSERLER TFDANYRIFA DSGVIAQELR AVNSFARMTT EPFNSKLVMF EDAAQLFGMS | 600 |
| GGLVEHAEEL REYLDNKMLD KTKLRLLPDG KVDTGFRNFI ISNVTESRRF RYLVRYCEPR | 660 |
| AVRDYMSCRP LIRLTLRDMP DTILRRYYEQ SVGAATVDRE RILDTLADKL LSLRFTDFEN | 720 |
| VNQRANAERN REKQKMMGII SLYLNVAYQI VKNLVYVNAR YTMAYHCAER DTELLLNAAG | 780 |
| EGNLLRRDRS WPARLHLPRR ALARRRDRVE VMERDVARGP EAYNRDEWLG LVRTLRREKR | 840 |
| VCDNLHNNYA YLCGADAEPG DASLSLLFVY RNKAAHLSVL NKGGRLSGDL KEAKSWFYVY | 900 |
| HFLMQRVLEE EFRNTQALPE RLRELLMMAE RYRGCSKDLI KVLNLTFAYN LPRYKNLSID | 960 |
| GRFDKNHPDP SDE. | 973 |

[0259] Exemplary CasRX/Cas13d proteins may comprise or consist of the sequence:

| CasRX/Cas13d Ga0129317_1008067: | |
|---|---|
| (SEQ ID NO: 110) | |
| MKKQKKSLVK AAGLKSAFVV GDSVYLTSFG KGNAARLDTK INPDNSTERY VSDSEKHTLK | 60 |
| INSITDTELR LSGPFPKQAE AKNPTHKKDN EQKNTRQDML GLKSTLEKFY FGSTFDDNIH | 120 |
| IQIIHNIQDI AKILAAHSNN AGYALDNMLA YQGVEFSDMI GYMGTSRTFD NYDPNHKNNK | 180 |
| DFFRFLKLPR LGYFGSAFYS QKGKDFEKRS DEEVYNICAL MGQIRQCCFH GKQEKYQLKW | 240 |
| LYNFHNFKSN KPFLDTLDKH FDEMIDRINK NFIKNNTPDL IILSGLYPDM AKKELVRLFY | 300 |
| DFTTVKEYKN MGFSVKKLRE KMLESEEASD FRDKDYDSVR RKLYKLMDFC IYYLYYSDSE | 360 |
| RNENLVSRLR ESLTDENKDI IYSKEAKIVW NELRKKFSTI LDNVKGSNIK KLENVKEKFI | 420 |
| SEDEFDDIKL DIDISYFSKL MYVMCYFLDG KEINDLLTTL VSKFDNIGSI IEAATQIGIN | 480 |
| IEFIDDFKFF DRSKDISVEL NIIRNFARMQ APVPNAKRAM QEDAIRILGG SEEDIFSILD | 540 |
| DMTGYDKSGK KLAQSKKGFR NFIINNVVES SRFKYIVRYS NPQKIRKLAN NSVVVGFVLG | 600 |
| KLPDAQIESY FNSCLPNRVY STPDKARESL RDMLHNISFN DFADVKQDDR RATPEEKVEK | 660 |
| ERYKAIIGLY LTVMYHLVKN LVYVNSRYVM AFHCLERDAM HYDVSLDNYR DLIRHLISEG | 720 |
| DSSCNHFISH NRRMRDCIEE NVKNSEQLIF GKEDAVIRFR NNVAHLSAIR NANEYIGDIR | 780 |
| EITSYFALYH YLMQRKLIDD CKVNDTAHKY FEQLTKYKTY VMDMVKALCS PFGYNLPRFK | 840 |
| NLSIEGKFDM HESK. | 854 |

[0260] Exemplary CasRX/Cas13d proteins may comprise or consist of the sequence:

| CasRX/Cas13d Ga0224415_10048792: | |
|---|---|
| (SEQ ID NO: 111) | |
| MSKKENRKSY VKGLGLKSTL VSDSKVYLTT FADGSNAKLE KCVENNKIIC ISNDKEAFAA | 60 |
| SIANKNVGYK IKNDEKFRHP KGYDIISNNP LLHNNSVQQD MLGLKNVLEK RYFGKSSGGD | 120 |
| NNLCIQIIHN IIDIEKILSE YIPNVVYAFN NIAGFKDEHN NIIDIIGTQT YNSSYTYADF | 180 |
| SKDKSDKKYI EFQKLLKNKR LGYWGKAFFT GQGNNAKVRQ ENQCFHIIAL LISLRNWATH | 240 |
| SNELDKHTKR TWLYKLDDTN ILNAEYVKTL NYLYDTIADE LTKSFSKNGA VNVNYLAKKY | 300 |
| NIKDDLPGFS EQYFRFSIMK EQKNLGFNIS KLRENMLDFK DMSVIRDDHN RYDKDRSKIY | 360 |
| TMMDFVIYRY YIDNNNDSID FINKLRSSID EKSKEKLYNE EANRLWNKLK EYMLYIKEFN | 420 |
| GKLASRTPDR DGNISEFVES LPKIHRLLPR GQKISNFSKL MYLLTMFLDG KEINDLLTTL | 480 |
| INKFENIQGF LDIMPEINVN AKFEPEYVFF NKSHEIAGEL KLIKGFAQMG EPAATLKLEM | 540 |
| TADAIKILGT EKEDAELIKL AESLFKDENG KLLGNKQHGM RNFIGNNVIK SKRFHYLIRY | 600 |
| GDPAHLHKIA TNKNVVRFVL GRIADMQKKQ GQKGKNQIDR YYEVCVGNKD IKKTIEEKID | 660 |
| ALTDIIVNMN YDQFEKKKAV IENQNRGKTF EEKNKYKRDN AEREKFKKII SLYLTVIYHI | 720 |
| LKNIVNVNSR YILGFHCLER DKQLYIEKYN KDKLDGFVAL TKFCLGDEER FEDLKAKAQA | 780 |
| SIQALETANP KLYAKYMNYS DEEKKEEFKK QLNRERVKNA RNAYLKNIKN YIMIRLQLRD | 840 |
| QTDSSGYLCG EFRDKVAHLE VARHAHEYIG NIKEVNSYFQ LYHYIMQCRL YDVLKNNTKA | 900 |
| EAMVKGKAKE YFEALEKEGT YNDKLLKIAC VPFGYCIPRY KNLSMEELFD MNEEKKFKKK | 960 |
| APENT. | 965 |

[0261] Exemplary CasRX/Cas13d proteins may comprise or consist of the sequence:

| CasRX/Cas13d 160582958_gene49834: | |
|---|---|
| (SEQ ID NO: 112) | |
| MKNSVTFKLI QAQENKEAAR KKAKDIAEQA RIAKRNGVVK KEENRINRIQ IEIQTQKKSN | 60 |
| TQNAYHLKSL AKAAGVKSVF AIGNDLLMTG FGPGNDATIE KRVFQNRAIE TLSSPEQYSA | 120 |
| EFQNKQFKIK GNIKVLNHST QKMEEIQTEL QDNYNRPHFD LLGCKNVLEQ KYFGRTFSDN | 180 |
| IHVQIAYNIM DIEKLLTPYI NNIIYTLNEL MRDNSKDDFF GCDSHFSVAY LYDELKAGYS | 240 |
| DRLKTKPNLS KNIDRIWNNF CNYMNSDSGN TEARLAYFGE LFYKPKETGD AKSDYKTHLS | 300 |
| NNQKEEWELK SDKEVYNIFA ILCDLRHFCT HGESITPSGK PFPYNLEKNL FPEAKQVLNS | 360 |
| LFEEKAESLG AEAFGKTAGK TDVSILLKVF EKEQASQKEQ QALLKEYYDF KVQKTYKNMG | 420 |
| FSIKKLREAI MEIPDAAKFK DDLYSSLRHK LYGLFDFILV KHFLDTSDSE NLQNNDIFRQ | 480 |
| LRACRCEEEK DQVYRSIAVK VWEKVKKKEL NMFKQVVVIP SLSKDELKQM EMTKNTELLS | 540 |
| SIETISTQAS LFSEMIFMMT YLLDGKEINL LCTSLIEKFE NIASFNEVLK SPQIGYETKY | 600 |
| TEGYAFFKNA DKTAKELRQV NNMARMTKPL GGVNTKCVMY NEAAKILGAK PMSKAELESV | 660 |
| FNLDNHDYTY SPSGKKIPNK NFRNFIINNV ITSRRFLYLI RYGNPEKIRK IAINPSIISF | 720 |
| VLKQIPDEQI KRYYPPCIGK RTDDVTLMRD ELGKMLQSVN FEQFSRVNNK QNAKQNPNGE | 780 |
| KARLQACVRL YLTVPYLFIK NMVNINARYV LAFHCLERDH ALCFNSRKLN DDSYNEMANK | 840 |
| FQMVRKAKKE QYEKEYKCKK QETGTAHTKK IEKLNQQIAY IDKDIKNMHS YTCRNYRNLV | 900 |
| AHLNVVSKLQ NYVSELPNDY QITSYFSFYH YCMQLGLMEK VSSKNIPLVE SLKNEANDAQ | 960 |
| SYSAKKTLEY FDLIEKNRTY CKDFLKALNA PFSYNLPRFK NLSIEALFDK NIVYEQADLK | 1020 |
| KE. | 1022 |

[0262] An exemplary direct repeat sequence of CasRX/Cas13d proteins may comprise or consist of the sequence

CasRX/Cas13d 160582958_gene49834
(SEQ ID NO: 112) comprises or consists of the
nucleic acid sequence:
CasRX/Cas13d DR:
(SEQ ID NO: 113)

| | |
|---|---|
| gaactacacc cctctgttct tgtaggggtc taacac. | 36 |

[0263] Exemplary CasRX/Cas13d proteins may comprise or consist of the sequence:

CasRX/Cas13d 250twins_35838_GL0110300:
(SEQ ID NO: 114)

| | |
|---|---|
| MGNKQRVSAQ KRRENAKLCN QQKARQAESQ RDKIKNMNVE KMKNINTNDI KHTKTTAKKL | 60 |
| GLKSTIIADK KIILTSFINE QSSKTANIEK VAGFKGDTID TISYTPRMFR SEINPGEIVI | 120 |
| SKGDDLSEFA NPANFPIGRD YVKIRSALEK QYFGKEFPED NLHVQIAYNV ADIKKILSVY | 180 |
| INNIIYMFYN LARSEEYDIF YNSQSENSGR DCDVIGSLYY QASYRNQDAN RFEKDGKKKA | 240 |
| IDSLLDDTRA YYTYFDGLFS VPKREDDGKI KESEKEKAKD QNFDVLRLLS VGRQLTFHSD | 300 |
| KSNNEAYLFD LSKLTRAAQD ENRRQDIQSL LNILNSTCRS NLEGVNGDFV KHAKNNLYVL | 360 |
| NQLYPSLKAN DLIGEYYNFI VKKENRNIGI RLITVRELII EHNYTNLKDS KYDTYRNKIY | 420 |
| TVLNFILFRE IQENSIAIKN FREKLRSTEK AEQPALYQAF ANKIYPMVQA KFAKAIDLFE | 480 |
| EQYKTKFKSE FKGGISIENM QQQNILLQTE NIDYFSKYVL FLTKFLDGKE INELLCALIN | 540 |
| KFDNIADLLD ISKQIGTPVV FCADYESLND AAKIAENIRL IKNIAHLRPA IQEAQSSKDN | 600 |
| ADAAGTPATL LIDAYNMLNT DIQLVYGEAA YEELRKDLFE RKNGTKYNKK GKKVDVYDHK | 660 |
| FRNFLINNVI KSKWFFYIAK YVKPADCAKM MSNKKMIEFA LRDLPETQIK RYYYTITGNE | 720 |
| ALGDAESLKG VIIEQLHAFS IKNTLLSIKN MGEGEYKIQQ IGSSKEKLKA IVNLYLTVAY | 780 |
| LLTKSLVKVN IRFSIAFGCL ERDLVLQKKS EKKFDAIINE ILLEDDKIRK ECDKERAQAK | 840 |
| TLPRELAQER FAQIKRRESG CYFKSYHVYD YLSKNSNEFK QNHIDFAVTS YRNNVEHLNV | 900 |
| VHCMTKYFSE VKDVKSYYGV YCYIMQRMLC DELIIKNQDK PDVRQTFEEY NRLLKDHGTY | 960 |
| SKNLMWLLNF PFAYNLARYK NLSNEDLFNA KNNDQKSK. | 998 |

[0264] Exemplary CasRX/Cas13d proteins may comprise or consist of the sequence:

| CasRX/Cas13d 250twins_36050_GL0158985: | |
|---|---|
| (SEQ ID NO: 115) | |
| MKKKHQSAAE KRQVKKLKNQ EKAQKYASEP SPLQSDTAGV ECSQKKTVVS HIASSKTLAK | 60 |
| AMGLKSTLVM GDKLVITSFA ASKAVGGAGY KSANIEKITD LQGRVIEEHE RMFSADVGEK | 120 |
| NIELSKNDCH TNVNNPVVTN IGKDYIGLKS RLEQEFFGKT FENDNLHVQL AYNILDIKKI | 180 |
| LGTYVNNIIY IFYNLNRAGT GRDERMYDDL IGTLYAYKPM EAQQTYLLKG DKDMRRFEEV | 240 |
| KQLLQNTSAY YVYYGTLFEK VKAKSKKEQR AKEAEIDACT AHNYDVLRLL SLMRQLCMHS | 300 |
| VAGTAFKLAE SALFNIEDVL SADLKEILDE AFSGAVNKLN DGFVQHSGNN LYVLQQLYPN | 360 |
| ETIERIAEKY YRLTVRKEDL NMGVNIKKLR ELIVGQYFPE VLDKEYDLSK NGDSVVTYRS | 420 |
| KIYTVMNYIL LYYLEDHDSS RESMVEALRQ NREGDEGKEE IYRQFAKKVW NGVSGLFGVC | 480 |
| LNLFKTEKRN KFRSKVALPD VSGAAYMLSS ENIDYFVKML FFVCKFLDGK EINELLCALI | 540 |
| NKFDNIADIL DAAAQCGSSV WFVDSYRFFE RSRRISAQIR IVKNIASKDF KKSKKDSDES | 600 |
| YPEQLYLDAL ALLGDVISKY KQNRDGSVVI DDQGNAVLTE QYKRFRYEFF EEIKRDESGG | 660 |
| IKYKKSGKPE YNHQRRNFIL NNVLKSKWFF YVVKYNRPSS CRELMKNKEI LRFVLRDIPD | 720 |
| SQVRRYFKAV QGEEAYASAE AMRTRLVDAL SQFSVTACLD EVGGMTDKEF ASQRAVDSKE | 780 |
| KLRAIIRLYL TVAYLITKSM VKVNTRFSIA FSVLERDYYL LIDGKKKSSD YTGEDMLALT | 840 |
| RKFVGEDAGL YREWKEKNAE AKDKYFDKAE RKKVLRQNDK MIRKMHFTPH SLNYVQKNLE | 900 |
| SVQSNGLAAV IKEYRNAVAH LNIINRLDEY IGSARADSYY SLYCYCLQMY LSKNFSVGYL | 960 |
| INVQKQLEEH HTYMKDLMWL LNIPFAYNLA RYKNLSNEKL FYDEEAAAEK ADKAENERGE. | 1020 |

[0265] Yan et al. (2018) Mol Cell. 70(2):327-339 (doi: 10.1016/j.molce1.2018.02.2018) and Konermann et al. (2018) Cell 173(3):665-676 (doi: 10.1016/j.cell/2018.02.033) have described CasRX/Cas13d proteins and both of which are incorporated by reference herein in their entireties. Also see WO Publication Nos. W02018/183703 (CasM) and W02019/006471 (Cas13d), which are incorporated herein by reference in their entirety.

[0266] Exemplary wild type Cas13d proteins of the disclosure may comprise or consist of the amino acid sequence:

| Cas13d (Ruminococcus flavefaciens XPD3002) sequence: | |
|---|---|
| (SEQ ID NO: 45) | |
| 1 | IEKKKSFAKG MGVKSTLVSG SKVYMTTFAE GSDARLEKIV EGDSIRSVNE GEAFSAEMAD |
| 61 | KNAGYKIGNA KFSHPKGYAV VANNPLYTGP VQQDMLGLKE TLEKRYFGES ADGNDNICIQ |
| 121 | VIHNILDIEK ILAEYITNAA YAVNNISGLD KDIIGFGKFS TVYTYDEFKD PEHHRAAFNN |
| 181 | NDKLINAIKA QYDEFDNFLD NPRLGYFGQA FFSKEGRNYI INYGNECYDI LALLSGLAHW |
| 241 | VVANNEEESR ISRTWLYNLD KNLDNEYIST LNYLYDRITN ELTNSFSKNS AANVNYIAET |
| 301 | LGINPAEFAE QYFRFSIMKE QKNLGFNITK LREVMLDRKD MSEIRKNHKV FDSIRTKVYT |
| 361 | MMDFVIYRYY IEEDAKVAAA NKSLPDNEKS LSEKDIFVIN LRGSFNDDQK DALYYDEANR |
| 421 | IWRKLENIMH NIKEFRGNKT REYKKKDAPR LPRILPAGRD VSAFSKLMYA LTMFLDGKEI |
| 481 | NDLLTTLINK FDNIQSFLKV MPLIGVNAKF VEEYAFFKDS AKIADELRLI KSFARMGEPI |
| 541 | ADARRAMYID AIRILGTNLS YDELKALADT FSLDENGNKL KKGKHGMRNF IINNVISNKR |
| 601 | FHYLIRYGDP AHLHEIAKNE AVVKFVLGRI ADIQKKQGQN GKNQIDRYYE TCIGKDKGKS |
| 661 | VSEKVDALTK IITGMNYDQF DKKRSVIEDT GRENAEREKF KKIISLYLTV IYHILKNIVN |
| 721 | INARYVIGFH CVERDAQLYK EKGYDINLKK LEEKGFSSVT KLCAGIDETA PDKRKDVEKE |
| 781 | MAERAKESID SLESANPKLY ANYIKYSDEK KAEEFTRQIN REKAKTALNA YLRNTKWNVI |
| 841 | IREDLLRIDN KTCTLFANKA VALEVARYVH AYINDIAEVN SYFQLYHYIM QRIIMNERYE |
| 901 | KSSGKVSEYF DAVNDEKKYN DRLLKLLCVP FGYCIPRFKN LSIEALFDRN EAAKFDKEKK |
| 961 | KVSGNS. |

[0267] Exemplary wild type Cas13d proteins of the disclosure may comprise or consist of the amino acid sequence:

Cas13d (contig e-k87_11092736):
(SEQ ID NO: 46)
MKRQKTFAKRIGIKSTVAYGQGKYAITTFGKGSKAEIAVRSADPPEETLP
TESDATLSIHAKFAKAGRDGREFKCGDVDETRIHTSRSEYESLISNPAES
PREDYLGLKGTLERKFFGDEYPKDNLRIQIIYSILDIQKILGLYVEDILH
FVDGLQDEPEDLVGLGLGDEKMQKLLSKALPYMGFFGSTDVFKVTKKREE
RAAADEHNAKVFRALGAIRQKLAHFKWKESLAIFGANANMPIRFFQGATG
GRQLWNDVIAPLWKKRIERVRKSFLSNSAKNLWVLYQVFKDDTDEKKKAR
ARQYYHFSVLKEGKNLGFNLTKTREYFLDKFFPIFHSSAPDVKRKVDTFR
SKFYAILDFIIYEASVSVANSGQMGKVAPWKGAIDNALVKLREAPDEEAK
EKIYNVLAASIRNDSLFLRLKSACDKFGAEQNRPVFPNELRNNRDIRNVR
SEWLEATQDVDAAAFVQLIAFLCNFLEGKEINELVTALIKKFEGIQALID
LLRNLEGVDSIRFENEFALFNDDKGNMAGRIARQLRLLASVGKMKPDMTD
AKRVLYKSALEILGAPPDEVSDEWLAENILLDKSNNDYQKAKKTVNPFRN
YIAKNVITSRSFYYLVRYAKPTAVRKLMSNPKIVRYVLKRLPEKQVASYY
SAIWTQSESNSNEMVKLIEMIDRLTTEIAGFSFAVLKDKKDSIVSASRES
RAVNLEVERLKKLTTLYMSIAYIAVKSLVKVNARYFIAYSALERDLYFFN
EKYGEEFRLHFIPYELNGKTCQFEYLAILKYYLARDEETLKRKCEICEEI
KVGCEKHKKNANPPYEYDQEWIDKKKALNSERKACERRLHFSTHWAQYAT
KRDENMAKHPQKWYDILASHYDELLALQATGWLATQARNDAEHLNPVNEF
DVYIEDLRRYPEGTPKNKDYHIGSYFEIYHYIRQRAYLEEVLAKRKEYRD
SGSFTDEQLDKLQKILDDIRARGSYDKNLLKLEYLPFAYNLPRYKNLTTE
ALFDDDSVSGKKRVAEWREREKTREAEREQRRQR.

[0268] An exemplary direct repeat sequence of Cas13d (contig e-k87_11092736) (SEQ ID NO:

[0269] 46) comprises or consists of the nucleic acid sequence:

Cas13d (contig e-k87_11092736)
Direct Repeat Sequence):

(SEQ ID NO: 47)

GTGAGAAGTCTCCTTATGGGGAGATGCTAC.

[0270] Exemplary wild type Cas13d proteins of the disclosure may comprise or consist of the amino acid sequence:

Cas13d (160582958_gene49834):
(SEQ ID NO: 48)
MKNSVTFKLIQAQENKEAARKKAKDIAEQARIAKRNGVVKKEENRINRIQ
IEIQTQKKSNTQNAYHLKSLAKAAGVKSVFAIGNDLLMTGFGPGNDATIE
KRVFQNRAIETLSSPEQYSAEFQNKQFKIKGNIKVLNHSTQKMEEIQTEL
QDNYNRPHFDLLGCKNVLEQKYFGRTFSDNIHVQIAYNIMDIEKLLTPYI
NNIIYTLNELMRDNSKDDFFGCDSHFSVAYLYDELKAGYSDRLKTKPNLS
KNIDRIWNNFCNYMNSDSGNTEARLAYFGELFYKPKETGDAKSDYKTHLS
NNQKEEWELKSDKEVYNIFAILCDLRHFCTHGESITPSGKPFPYNLEKNL
FPEAKQVLNSLFEEKAESLGAEAFGKTAGKTDVSILLKVFEKEQASQKEQ
QALLKEYYDFKVQKTYKNMGFSIKKLREAIMEIPDAAKFKDDLYSSLRHK
LYGLFDFILVKHFLDTSDSENLQNNDIFRQLRACRCEEEKDQVYRSIAVK
VWEKVKKKELNMFKQVVVIPSLSKDELKQMEMTKNTELLSSIETISTQAS
LFSEMIFMMTYLLDGKEINLLCTSLIEKFENIASFNEVLKSPQIGYETKY
TEGYAFFKNADKTAKELRQVNNMARMTKPLGGVNTKCVMYNEAAKILGAK
PMSKAELESVFNLDNHDYTYSPSGKKIPNKNFRNFIINNVITSRRFLYLI
RYGNPEKIRKIAINPSIISFVLKQIPDEQIKRYYPPCIGKRTDDVTLMRD
ELGKMLQSVNFEQFSRVNNKQNAKQNPNGEKARLQACVRLYLTVPYLFIK
NMVNINARYVLAFHCLERDHALCFNSRKLNDDSYNEMANKFQMVRKAKKE
QYEKEYKCKKQETGTAHTKKIEKLNQQIAYIDKDIKNMHSYTCRNYRNLV
AHLNVVSKLQNYVSELPNDYQITSYFSFYHYCMQLGLMEKVSSKNIPLVE
SLKNEANDAQSYSAKKTLEYFDLIEKNRTYCKDFLKALNAPFSYNLPRFK
NLSIEALFDKNIVYEQADLKKE.

[0271] An exemplary direct repeat sequence of Cas13d (160582958_gene49834) (SEQ ID NO: 48) comprises or consists of the nucleic acid sequence:

Cas13d (160582958_gene49834)
Direct Repeat Sequence:

(SEQ ID NO: 49)

GAACTACACCCCTCTGTTCTTGTAGGGGTCTAACAC.

[0272] Exemplary wild type Cas13d proteins of the disclosure may comprise or consist of the amino acid sequence:

Cas13d (contig tpg|DJXD01000002.1|; uncultivated
Ruminococcus assembly, UBA7013, from
sheep gut metagenome):
(SEQ ID NO: 50)
MKKQKSKKTVSKTSGLKEALSVQGTVIMTSFGKGNMANLSYKIPSSQKPQ
NLNSSAGLKNVEVSGKKIKFQGRHPKIATTDNPLFKPQPGMDLLCLKDKL
EMHYFGKTFDDNIHIQLIYQILDIEKILAVHVNNIVFTLDNVLHPQKEEL
TEDFIGAGGWRINLDYQTLRGQTNKYDRFKNYIKRKELLYFGEAFYHENE
RRYEEDIFAILTLLSALRQFCFHSDLSSDESDHVNSFWLYQLEDQLSDEF
KETLSILWEEVTERIDSEFLKTNTVNLHILCHVFPKESKETIVRAYYEFL
IKKSFKNMGFSIKKLREIMLEQSDLKSFKEDKYNSVRAKLYKLFDFIITY
YYDHHAFEKEALVSSLRSSLTEENKEEIYIKTARTLASALGADFKKAAAD
VNAKNIRDYQKKANDYRISFEDIKIGNTGIGYFSELIYMLTLLLDGKEIN
DLLTTLINKFDNIISFIDILKKLNLEFKFKPEYADFFNMTNCRYTLEELR
VINSIARMQKPSADARKIMYRDALRILGMDNRPDEEIDRELERTMPVGAD
GKFIKGKQGFRNFIASNVIESSRFHYLVRYNNPHKTRTLVKNPNVVKFVL
EGIPETQIKRYFDVCKGQEIPPTSDKSAQIDVLARIISSVDYKIFEDVPQ
SAKINKDDPSRNFSDALKKQRYQAIVSLYLTVMYLITKNLVYVNSRYVIA
FHCLERDAFLHGVTLPKMNKKIVYSQLTTHLLTDKNYTTYGHLKNQKGHR
KWYVLVKNNLQNSDITAVSSFRNIVAHISVVRNSNEYISGIGELHSYFEL
YHYLVQSMIAKNNWYDTSHQPKTAEYLNNLKKHHTYCKDFVKAYCIPFGY
VVPRYKNLTINELFDRNNPNPEPKEEV.

[0273] An exemplary direct repeat sequence of Cas13d (contig tpg |DJXDO1000002.1|; uncultivated Ruminococcus assembly, UBA7013, from sheep gut metagenome) (SEQ ID NO: 50) comprises or consists of the nucleic acid sequence:

Cas13d (contig tpg|DJXD01000002.1|;
uncultivated Ruminococcus assembly,
UBA7013, from sheep gut metagenome):

(SEQ ID NO: 51).

CAACTACAACCCCGTAAAAATACGGGGTTCTGAAAC

[0274] In some embodiments of the disclosure, a CjeCas9-endonuclease fusions and gRNA molecule may comprise or consist of the nucleic acid sequence of:

E43-CjeCas9 and sgRNA plasmid
(U6: N's = sgRNA spacer, E43, CjeCas9)
(SEQ ID NO: 202)
gtttattacagggacagcagagatccagtttggttaattaaggtaccgag
ggcctatttcccatgattccttcatatttgcatatacgatacaaggctgt
tagagagataattagaattaatttgactgtaaacacaaagatattagtac
aaaatacgtgacgtagaaagtaataatttcttgggtagtttgcagtttta
aaattatgttttaaaatggactatcatatgcttaccgtaacttgaaagta
tttcgatttcttggctttatatatcttGTGGAAAGGACGAAACACCNNNN
NNNNNNNNNNNNNNNGTTTTAGTCCCTGAAGGGACTAAAATAAAGAGTTT
GCGGGACTCTGCGGGGTTACAATCCCCTAAAACCGCTTTTTTTCCTGCAG
CCCGGGGGATCCACTAGTTCTAGAGCGGCCGCCACCGCGGTGGAGCTCCA
GCTTTTGTTCCCTTTAGTGAGGGTTAATTGCGCGAATTCGCTAGCTAGGT
CTTGAAAGGAGTGGGAATTGGCTCCGGTGCCCGTCAGTGGGCAGAGCGCA
CATCGCCCACAGTCCCCGAGAAGTTGGGGGGAGGGGTCGGCAATTGATCC
GGTGCCTAGAGAAGGTGGCGCGGGGTAAACTGGGAAAGTGATGTCGTGTA
CTGGCTCCGCCTTTTTCCCGAGGGTGGGGGAGAACCGTATATAAGTGCAG
TAGTCGCCGTGAACGTTCTTTTTCGCAACGGGTTTGCCGCCAGAACACAG
GACCGGTTCTAGAGCGCTATTTAGAACCatgTGTTCTCCCCAAGAATCTG
GCATGACCGCTCTTTCAGCGAGGATGTTGACGCGAAGCAGATCCCTGGGA
CCTGGGGCCGGGCCACGAGGGTGTCGGGAAGAACCAGGACCGTTGCGACG
GAGGGAAGCAGCAGCGGAAGCTCGGAAATCCCATTCTCCGGTTAAACGAC
CCCGCAAGGCACAACGGCTCAGGGTTGCTTACGAGGGGAGCGATTCCGAA
AAGGGTGAAGGAGCAGAGCCCTTGAAGGTTCCAGTATGGGAACCCCAGGA
TTGGCAGCAGCAGCTTGTAAACATCCGAGCAATGAGGAACAAAAAAGATG
CACCTGTTGATCACCTCGGAACCGAACATTGTTATGATTCTAGTGCGCCG
CCAAAAGTCCGCCGGTATCAGGTTCTGTTGAGTTTGATGCTGAGTAGTCA
GACTAAGGACCAGGTTACGGCCGGAGCAATGCAACGGCTTCGGGCACGGG
GACTCACGGTCGATAGCATTTTGCAGACCGATGACGCAACATTGGGTAAA
CTCATATATCCAGTTGGCTTCTGGCGGAGCAAAGTGAAGTACATCAAGCA
GACCTCAGCCATTCTCCAACAACATTACGGAGGTGATATACCCGCAAGCG
TAGCTGAACTGGTAGCACTGCCGGGCGTCGGTCCCAAAATGGCACATCTG
GCTATGGCGGTTGCTTGGGGAACGGTGTCTGGTATCGCAGTTGATACGCA
TGTCCACCGCATCGCCAATCGGCTGAGGTGGACTAAAAAAGCCACTAAGT
CTCCTGAAGAAACACGGGCTGCTCTGGAAGAGTGGCTTCCACGAGAGCTG
TGGCATGAAATCAATGGATTGCTGGTTGGTTTCGGGCAGCAGACATGCTT
GCCCGTGCACCCCCGGTGTCATGCTTGCTTGAACCAGGCTTTGTGCCCAG
CTGCCCAGGGCCTGAGTGGAAGTGAGACACCGGGAACATCTGAGTCTGCG
ACCCCGGAGAGCacaaacGCGCGAATCCTGGCCTTCGcgATTGGCATTAG
CAGCATCGGCTGGGCATTCTCTGAAAACGACGAACTGAAGGATTGCGGCG
TGCGAATTTTCACTAAGGTCGAAAATCCCAAAACTGGTGAATCACTCGCT
CTCCCTAGACGACTGGCACGCTCCGCACGAAAGAGGCTTGCCCGCCGCAA
GGCACGCTTGAACCATCTTAAACACCTTATTGCAAATGAGTTTAAACTGA
ATTATGAGGACTACCAATCCTTTGACGAGTCTCTTGCTAAAGCCTACAAA
GGGAGCCTTATATCCCCGTATGAGCTCCGGTTCAGAGCACTCAACGAACT
GCTGTCCAAACAGGATTTTGCTCGCGTGATTCTCCACATAGCGAAGAGGC
GAGGATACGATGACATTAAAAACAGTGATGATAAGGAAAAAGGGGCCATA
CTCAAAGCGATTAAGCAAAATGAAGAGAAGCTCGCTAACTATCAATCAGT
AGGGGAGTATCTCTATAAAGAGTACTTCCAGAAGTTCAAAGAAAATAGCA
AGGAATTTACTAATGTCCGGAATAAAAAGGAGTCTTACGAAAGATGTATT
GCGCAATCTTTCCTCAAGGACGAGCTCAAATTGATTTTCAAGAAACAAAG
GGAATTTGGGTTCAGCTTCTCAAAAAAATTTGAGGAAGAGGTTCTGAGCG
TTGCCTTTTACAAACGCGCCCTTAAGGACTTCTCACATCTCGTAGGGAAT
TGTAGTTTCTTCACCGATGAAAAACGGGCGCCAAAAAATAGCCCTTTGGC
TTTTATGTTTGTCGCTCTGACTCGCATCATTAATCTGCTCAACAACCTTA
AAAACACGGAAGGGATTCTGTACACAAAGGATGATCTGAACGCTCTGCTT
AACGAAGTTTTGAAGAACGGGACTTTGACCTACAAACAAACCAAAAAGCT
TCTTGGTCTCAGTGATGACTACGAATTCAAGGGAGAAAAAGGGACATATT
TCATCGAATTCAAGAAGTATAAGGAGTTCATCAAAGCCTTGGGCGAGCAC
AACTTGTCTCAAGATGATCTCAACGAAATTGCTAAGGATATCACTCTGAT
TAAAGACGAGATCAAGCTCAAAAAGGCGTTGGCGAAGTATGACCTTAACC
AAAACCAAATAGATAGCCTCAGCAAGTTGGAATTTAAAGATCACTTGAAT
ATAAGTTTCAAGGCCCTTAAGTTGGTCACCCCCTTGATGCTTGAAGGAAA
GAAATATGATGAGGCATGTAATGAGCTGAATCTCAAGGTTGCTATTAACG
AAGACAAAAAAGATTTCCTCCCAGCTTTCAATGAGACTTACTATAAGGAC
GAGGTTACCAATCCTGTGGTGCTCCGAGCCATCAAAGAGTATCGAAAGGT
CCTGAATGCTTTGCTCAAAAAATACGGTAAGGTACACAAAATAAATATTG
AGCTCGCAAGGGAGGTCGGTAAGAACCACTCCCAGCGCGCCAAAATAGAA
AAGGAACAGAATGAAAATTACAAAGCGAAAAAGGACGCCGAGCTCGAGTG
CGAAAAGCTGGGCCTGAAAATAAACAGCAAGAACATTCTCAAACTCCGCC
TCTTCAAAGAACAAAAAGAATTTTGTGCTTATAGTGGTGAGAAAATAAAA
ATCTCCGATCTTCAAGACGAGAAGATGCTCGAAATAGACgcgATATATCC
ATATAGCAGGTCTTTTGACGATTCTTACATGAATAAAGTGCTTGTTTTCA
CTAAGCAGAATCAGGAAAAGTTGAATCAGACCCCCTTTGAGGCCTTTGGC
AACGACTCAGCAAAGTGGCAGAAGATCGAGGTCTTGGCTAAGAATCTTCC
TACTAAGAAACAGAAAAGGATATTGGATAAGAACTATAAAGACAAAGAAC
AAAAGAACTTTAAAGACCGCAACCTCAATGACACCAGATACATAGCAAGA
TTGGTTCTGAACTACACAAAAGATTATTTGGACTTCTTGCCGCTGTCTGA
TGATGAGAACACGAAACTCAACGACACGCAAAAGGGGTCTAAAGTCCACG
TCGAAGCTAAATCTGGGATGCTCACCTCAGCATTGAGGCATACGTGGGGA
TTCTCAGCAAAGGACCGAAACAATCACCTGCACCATGCCATTGACGCAGT
TATCATAGCGTATGCCAATAATTCAATAGTAAAAGCGTTTAGCGACTTCA
AGAAGGAACAAGAGTCCAACAGCGCCGAGCTCTACGCAAAAAAGATTAGT
GAACTCGACTACAAAAACAAAAGAAAATTCTTTGAGCCGTTCAGCGGATT
TCGACAGAAGGTATTGGATAAAATAGATGAAATTTTCGTGAGCAAACCCG
AAAGGAAAAAGCCCTCAGGCGCCTTGCACGAAGAGACTTTCAGGAAGGAA
GAGGAATTCTACCAAAGCTACGGCGGAAAAGAGGGAGTTTTGAAGGCTCT
CGAACTTGGAAAGATTAGGAAGGTGAACGGCAAGATAGTGAAAAACGGCG
ATATGTTCCGGGTTGATATCTTCAAACATAAAAAAACGAATAAATTTTAT
GCTGTGCCTATATACACTATGGACTTCGCACTTAAGGTCCTGCCGAATAA
GGCGGTAGCCCGATCTAAAAAAGGCGAAATTAAGGACTGGATTTTGATGG
ATGAAAATTACGAGTTCTGCTTTTCTCTCTACAAGGATTCCCTTATATTG
ATACAGACGAAAGATATGCAGGAACCGGAATTCGTGTATTACAACGCTTT
TACTTCCTCTACGGTATCTTTGATTGTCTCCAAACATGACAACAAATTCG
AAACACTCAGTAAAAACCAAAAGATTCTCTTTAAAAATGCGAACGAGAAA
GAAGTAATTGCAAAATCAATTGGCATCCAAAATTTGAAAGTTTTTGAAAA
ATATATAGTATCTGCCCTCGGAGAGGTTACTAAAGCGGAATTTAGACAGC
GAGAGGACTTCAAAAAATCAGGTCCACCCAAGAAAAAACGCAAGGTGGAA
GATCCGAAGAAAAAGCGAAAAGTGGATGTGtaaCGTTTTCCGGGACGCCG
GCTGGATGATCCTCCAGCGCGGGGATCTCATGCTGGAGTTCTTCGCCCAC
CCCAACTTGTTTATTGCAGCTTATAATGGTTACAAATAAAGCAATAGCAT
CACAAATTTCACAAATAAAGCATTTTTTTCACTGCATTCTAGTTGTGGTT
TGTCCAAACTCATCAATGTATCTTATCATGTCTGTATACCG.

[0275] In some embodiments of the disclosure, a CjeCas9-endonuclease fusions and gRNA molecule may comprise or consist of the nucleic acid sequence of:

E67-CjeCas9 and sgRNA plasmid
(U6: N's = sgRNA spacer, E67, CjeCas9)
(SEQ ID NO: 203)
gtttattacagggacagcagagatccagtttggttaattaaggtaccgag
ggcctatttcccatgattccttcatatttgcatatacgatacaaggctgt
tagagagataattagaattaatttgactgtaaacacaaagatattagtac
aaaatacgtgacgtagaaagtaataatttcttgggtagtttgcagtttta
aaattatgttttaaaatggactatcatatgcttaccgtaacttgaaagta
tttcgatttcttggctttatatatcttGTGGAAAGGACGAAACACCNNNN
NNNNNNNNNNNNNNNGTTTTAGTCCCTGAAGGGACTAAAATAAAGAGTTT
GCGGGACTCTGCGGGGTTACAATCCCCTAAAACCGCTTTTTTTCCTGCAG
CCCGGGGGATCCACTAGTTCTAGAGCGGCCGCCACCGCGGTGGAGCTCCA
GCTTTTGTTCCCTTTAGTGAGGGTTAATTGCGCGAATTCGCTAGCTAGGT
CTTGAAAGGAGTGGGAATTGGCTCCGGTGCCCGTCAGTGGGCAGAGCGCA
CATCGCCCACAGTCCCCGAGAAGTTGGGGGGAGGGGTCGGCAATTGATCC
GGTGCCTAGAGAAGGTGGCGCGGGGTAAACTGGGAAAGTGATGTCGTGTA
CTGGCTCCGCCTTTTTCCCGAGGGTGGGGGAGAACCGTATATAAGTGCAG
TAGTCGCCGTGAACGTTCTTTTTCGCAACGGGTTTGCCGCCAGAACACAG
GACCGGTTCTAGAGCGCTATTTAGAACCatgCAGGAGGTAATAGCGGGGC
TTGAGCGATTTACCTTTGCCTTCGAAAAAGACGTAGAGATGCAGAAGGGA
ACCGGCCTGCTCCCATTTCAAGGTATGGACAAATCAGCATCTGCCGTGTG
CAATTTTTTCACCAAGGGTCTGTGTGAAAAGGGGAAGCTCTGTCCATTTC
GCCATGATCGCGGAGAGAAGATGGTGGTGTGTAAGCACTGGCTGAGAGGG
CTTTGCAAAAAAGGCGACCACTGCAAATTTCTTCACCAATATGACCTGAC
TCGAATGCCTGAGTGTTATTTTTACAGTAAGTTCGGTGACTGTAGCAACA
AAGAATGCAGCTTCTTGCATGTCAAACCAGCATTCAAGTCACAGGATTGC
CCGTGGTACGATCAGGGTTTTTGCAAGGACGGTCCCCTCTGCAAATATCG
ACACGTACCCAGAATTATGTGCCTTAATTACCTGGTCGGCTTCTGTCCTG
AAGGGCCAAAATGTCAGTTTGCTCAAAAAATTCGCGAGTTCAAATTGCTC
CCTGGGTCTAAAATTTGGGAACCCCAGGATTGGCAGCAGCAGCTTGTAAA
CATCCGAGCAATGAGGAACAAAAAAGATGCACCTGTTGATCACCTCGGAA
CCGAACATTGTTATGATTCTAGTGCGCCGCCAAAAGTCCGCCGGTATCAG
GTTCTGTTGAGTTTGATGCTGAGTAGTCAGACTAAGGACCAGGTTACGGC
CGGAGCAATGCAACGGCTTCGGGCACGGGGACTCACGGTCGATAGCATTT
TGCAGACCGATGACGCAACATTGGGTAAACTCATATATCCAGTTGGCTTC
TGGCGGAGCAAAGTGAAGTACATCAAGCAGACCTCAGCCATTCTCCAACA
ACATTACGGAGGTGATATACCCGCAAGCGTAGCTGAACTGGTAGCACTGC
CGGGCGTCGGTCCCAAAATGGCACATCTGGCTATGGCGGTTGCTTGGGGA
ACGGTGTCTGGTATCGCAGTTGATACGCATGTCCACCGCATCGCCAATCG
GCTGAGGTGGACTAAAAAAGCCACTAAGTCTCCTGAAGAAACACGGGCTG
CTCTGGAAGAGTGGCTTCCACGAGAGCTGTGGCATGAAATCAATGGATTG
CTGGTTGGTTTCGGGCAGCAGACATGCTTGCCCGTGCACCCCCGGTGTCA
TGCTTGCTTGAACCAGGCTTTGTGCCCAGCTGCCCAGGGCCTGAGTGGAA
GTGAGACACCGGGAACATCTGAGTCTGCGACCCCGGAGAGCacaaacGCG
CGAATCCTGGCCTTCGcgATTGGCATTAGCAGCATCGGCTGGGCATTCTC
TGAAAACGACGAACTGAAGGATTGCGGCGTGCGAATTTTCACTAAGGTCG
AAAATCCCAAAACTGGTGAATCACTCGCTCTCCCTAGACGACTGGCACGC
TCCGCACGAAAGAGGCTTGCCCGCCGCAAGGCACGCTTGAACCATCTTAA
ACACCTTATTGCAAATGAGTTTAAACTGAATTATGAGGACTACCAATCCT
TTGACGAGTCTCTTGCTAAAGCCTACAAAGGGAGCCTTATATCCCCGTAT
GAGCTCCGGTTCAGAGCACTCAACGAACTGCTGTCCAAACAGGATTTTGC
TCGCGTGATTCTCCACATAGCGAAGAGGCGAGGATACGATGACATTAAAA
ACAGTGATGATAAGGAAAAAGGGGCCATACTCAAAGCGATTAAGCAAAAT
GAAGAGAAGCTCGCTAACTATCAATCAGTAGGGGAGTATCTCTATAAAGA
GTACTTCCAGAAGTTCAAAGAAAATAGCAAGGAATTTACTAATGTCCGGA
ATAAAAAGGAGTCTTACGAAAGATGTATTGCGCAATCTTTCCTCAAGGAC
GAGCTCAAATTGATTTTCAAGAAACAAAGGGAATTTGGGTTCAGCTTCTC
AAAAAAATTTGAGGAAGAGGTTCTGAGCGTTGCCTTTTACAAACGCGCCC
TTAAGGACTTCTCACATCTCGTAGGGAATTGTAGTTTCTTCACCGATGAA
AAACGGGCGCCAAAAAATAGCCCTTTGGCTTTTATGTTTGTCGCTCTGAC
TCGCATCATTAATCTGCTCAACAACCTTAAAAACACGGAAGGGATTCTGT
ACACAAAGGATGATCTGAACGCTCTGCTTAACGAAGTTTTGAAGAACGGG
ACTTTGACCTACAAACAAACCAAAAAGCTTCTTGGTCTCAGTGATGACTA
CGAATTCAAGGGAGAAAAAGGGACATATTTCATCGAATTCAAGAAGTATA
AGGAGTTCATCAAAGCCTTGGGCGAGCACAACTTGTCTCAAGATGATCTC
AACGAAATTGCTAAGGATATCACTCTGATTAAAGACGAGATCAAGCTCAA
AAAGGCGTTGGCGAAGTATGACCTTAACCAAAACCAAATAGATAGCCTCA
GCAAGTTGGAATTTAAAGATCACTTGAATATAAGTTTCAAGGCCCTTAAG
TTGGTCACCCCCTTGATGCTTGAAGGAAAGAAATATGATGAGGCATGTAA
TGAGCTGAATCTCAAGGTTGCTATTAACGAAGACAAAAAAGATTTCCTCC
CAGCTTTCAATGAGACTTACTATAAGGACGAGGTTACCAATCCTGTGGTG
CTCCGAGCCATCAAAGAGTATCGAAAGGTCCTGAATGCTTTGCTCAAAAA
ATACGGTAAGGTACACAAAATAAATATTGAGCTCGCAAGGGAGGTCGGTA
AGAACCACTCCCAGCGCGCCAAAATAGAAAAGGAACAGAATGAAAATTAC
AAAGCGAAAAAGGACGCCGAGCTCGAGTGCGAAAAGCTGGGCCTGAAAAT
AAACAGCAAGAACATTCTCAAACTCCGCCTCTTCAAAGAACAAAAAGAAT
TTTGTGCTTATAGTGGTGAGAAAATAAAAATCTCCGATCTTCAAGACGAG
AAGATGCTCGAAATAGACgcgATATATCCATATAGCAGGTCTTTTGACGA
TTCTTACATGAATAAAGTGCTTGTTTTCACTAAGCAGAATCAGGAAAAGT
TGAATCAGACCCCCTTTGAGGCCTTTGGCAACGACTCAGCAAAGTGGCAG
AAGATCGAGGTCTTGGCTAAGAATCTTCCTACTAAGAAACAGAAAAGGAT
ATTGGATAAGAACTATAAAGACAAAGAACAAAAGAACTTTAAAGACCGCA
ACCTCAATGACACCAGATACATAGCAAGATTGGTTCTGAACTACACAAAA
GATTATTTGGACTTCTTGCCGCTGTCTGATGATGAGAACACGAAACTCAA
CGACACGCAAAAGGGGTCTAAAGTCCACGTCGAAGCTAAATCTGGGATGC
TCACCTCAGCATTGAGGCATACGTGGGGATTCTCAGCAAAGGACCGAAAC
AATCACCTGCACCATGCCATTGACGCAGTTATCATAGCGTATGCCAATAA
TTCAATAGTAAAAGCGTTTAGCGACTTCAAGAAGGAACAAGAGTCCAACA
GCGCCGAGCTCTACGCAAAAAAGATTAGTGAACTCGACTACAAAAACAAA
AGAAAATTCTTTGAGCCGTTCAGCGGATTTCGACAGAAGGTATTGGATAA
AATAGATGAAATTTTCGTGAGCAAACCCGAAAGGAAAAAGCCCTCAGGCG
CCTTGCACGAAGAGACTTTCAGGAAGGAAGAGGAATTCTACCAAAGCTAC
GGCGGAAAAGAGGGAGTTTTGAAGGCTCTCGAACTTGGAAAGATTAGGAA
GGTGAACGGCAAGATAGTGAAAAACGGCGATATGTTCCGGGTTGATATCT
TCAAACATAAAAAAACGAATAAATTTTATGCTGTGCCTATATACACTATG
GACTTCGCACTTAAGGTCCTGCCGAATAAGGCGGTAGCCCGATCTAAAAA
AGGCGAAATTAAGGACTGGATTTTGATGGATGAAAATTACGAGTTCTGCT
TTTCTCTCTACAAGGATTCCCTTATATTGATACAGACGAAAGATATGCAG
GAACCGGAATTCGTGTATTACAACGCTTTTACTTCCTCTACGGTATCTTT
GATTGTCTCCAAACATGACAACAAATTCGAAACACTCAGTAAAAACCAAA
AGATTCTCTTTAAAAATGCGAACGAGAAAGAAGTAATTGCAAAATCAATT
GGCATCCAAAATTTGAAAGTTTTTGAAAAATATATAGTATCTGCCCTCGG
AGAGGTTACTAAAGCGGAATTTAGACAGCGAGAGGACTTCAAAAAATCAG
GTCCACCCAAGAAAAAACGCAAGGTGGAAGATCCGAAGAAAAAGCGAAAA
GTGGATGTGtaaCGTTTTCCGGGACGCCGGCTGGATGATCCTCCAGCGCG
GGGATCTCATGCTGGAGTTCTTCGCCCACCCCAACTTGTTTATTGCAGCT
TATAATGGTTACAAATAAAGCAATAGCATCACAAATTTCACAAATAAAGC
ATTTTTTTCACTGCATTCTAGTTGTGGTTTGTCCAAACTCATCAATGTAT
CTTATCATGTCTGTATACCG.

gRNA Target Sequences

[0276] In some embodiments of the compositions of the disclosure, a target sequence of an RNA molecule comprises a sequence motif corresponding to the first RNA binding protein and/or the second RNA binding protein.

[0277] In some embodiments of the compositions and methods of the disclosure, the sequence motif is a signature of a disease or disorder.

[0278] A sequence motif of the disclosure may be isolated or derived from a sequence of foreign or exogenous sequence found in a genomic sequence, and therefore translated into an mRNA molecule of the disclosure or a sequence of foreign or exogenous sequence found in an RNA sequence of the disclosure.

[0279] A sequence motif of the disclosure may comprise or consist of a mutation in an endogenous sequence that causes a disease or disorder. The mutation may comprise or consist of a sequence substitution, inversion, deletion, insertion, transposition, or any combination thereof.

[0280] A sequence motif of the disclosure may comprise or consist of a repeated sequence. In some embodiments, the repeated sequence may be associated with a microsatellite instability (MSI). MSI at one or more loci results from impaired DNA mismatch repair mechanisms of a cell of the disclosure. A hypervariable sequence of DNA may be transcribed into an mRNA of the disclosure comprising a target sequence comprising or consisting of the hypervariable sequence.

[0281] A sequence motif of the disclosure may comprise or consist of a biomarker. The biomarker may indicate a risk of developing a disease or disorder. The biomarker may indicate a healthy gene (low or no determinable risk of developing a disease or disorder. The biomarker may indicate an edited gene. Exemplary biomarkers include, but are not limited to, single nucleotide polymorphisms (SNPs), sequence variations or mutations, epigenetic marks, splice acceptor sites, exogenous sequences, heterologous sequences, and any combination thereof.

[0282] A sequence motif of the disclosure may comprise or consist of a secondary, tertiary or quaternary structure. The secondary, tertiary or quaternary structure may be endogenous or naturally occurring. The secondary, tertiary or quaternary structure may be induced or non-naturally occurring. The secondary, tertiary or quaternary structure may be encoded by an endogenous, exogenous, or heterologous sequence.

[0283] In some embodiments of the compositions and methods of the disclosure, a target sequence of an RNA molecule comprises or consists of between 2 and 100 nucleotides or nucleic acid bases, inclusive of the endpoints. In some embodiments, the target sequence of an RNA molecule comprises or consists of between 2 and 50 nucleotides or nucleic acid bases, inclusive of the endpoints. In some embodiments, the target sequence of an RNA molecule comprises or consists of between 2 and 20 nucleotides or nucleic acid bases, inclusive of the endpoints.

[0284] In some embodiments of the compositions and methods of the disclosure, a target sequence of an RNA molecule is continuous. In some embodiments, the target sequence of an RNA molecule is discontinuous. For example, the target sequence of an RNA molecule may comprise or consist of one or more nucleotides or nucleic acid bases that are not contiguous because one or more intermittent nucleotides are positioned in between the nucleotides of the target sequence.

[0285] In some embodiments of the compositions and methods of the disclosure, a target sequence of an RNA molecule is naturally occurring. In some embodiments, the target sequence of an RNA molecule is non-naturally occurring. Exemplary non-naturally occurring target sequences may comprise or consist of sequence variations or mutations, chimeric sequences, exogenous sequences, heterologous sequences, chimeric sequences, recombinant sequences, sequences comprising a modified or synthetic nucleotide or any combination thereof.

[0286] In some embodiments of the compositions and methods of the disclosure, a target sequence of an RNA molecule binds to a guide RNA of the disclosure.

[0287] In some embodiments of the compositions and methods of the disclosure, a target sequence of an RNA molecule binds to a first RNA binding protein of the disclosure.

[0288] In some embodiments of the compositions and methods of the disclosure, a target sequence of an RNA molecule binds to a second RNA binding protein of the disclosure.

### RNA Molecules

[0289] In some embodiments of the compositions and methods of the disclosure, an RNA molecule of the disclosure comprises a target sequence. In some embodiments, the RNA molecule of the disclosure comprises at least one target sequence. In some embodiments, the RNA molecule of the disclosure comprises one or more target sequence(s). In some embodiments, the RNA molecule of the disclosure comprises two or more target sequences.

[0290] In some embodiments of the compositions and methods of the disclosure, an RNA molecule of the disclosure is a naturally occurring RNA molecule. In some embodiments, the RNA molecule of the disclosure is a non-naturally occurring molecule. Exemplary non-naturally occurring RNA molecules may comprise or consist of sequence variations or mutations, chimeric sequences, exogenous sequences, heterologous sequences, chimeric sequences, recombinant sequences, sequences comprising a modified or synthetic nucleotide or any combination thereof.

[0291] In some embodiments of the compositions and methods of the disclosure, an RNA molecule of the disclosure comprises or consists of a sequence isolated or derived from a virus.

[0292] In some embodiments of the compositions and methods of the disclosure, an RNA molecule of the disclosure comprises or consists of a sequence isolated or derived from a prokaryotic organism. In some embodiments, an RNA molecule of the disclosure comprises or consists of a sequence isolated or derived from a species or strain of archaea or a species or strain of bacteria.

[0293] In some embodiments of the compositions and methods of the disclosure, the RNA molecule of the disclosure comprises or consists of a sequence isolated or derived from a eukaryotic organism. In some embodiments, an RNA molecule of the disclosure comprises or consists of a sequence isolated or derived from a species of protozoa, parasite, protist, algae, fungi, yeast, amoeba, worm, microorganism, invertebrate, vertebrate, insect, rodent, mouse, rat, mammal, or a primate. In some embodiments, an RNA molecule of the disclosure comprises or consists of a sequence isolated or derived from a human.

[0294] In some embodiments of the compositions and methods of the disclosure, the RNA molecule of the disclosure comprises or consists of a sequence derived from a coding sequence from a genome of an organism or a virus. In some embodiments, the RNA molecule of the disclosure comprises or consists of a primary RNA transcript, a precursor messenger RNA (pre-nRNA) or messenger RNA (mRNA). In some embodiments, the RNA molecule of the disclosure comprises or consists of a gene product that has not been processed (e.g. a transcript). In some embodiments, the RNA molecule of the disclosure comprises or consists of a gene product that has been subject to post-transcriptional processing (e.g. a transcript comprising a 5′ cap and a 3′ polyadenylation signal). In some embodiments, the RNA molecule of the disclosure comprises or consists of a gene product that has been subject to alternative splicing (e.g. a splice variant). In some embodiments, the RNA molecule of the disclosure comprises or consists of a gene product that has been subject to removal of non-coding and/or intronic sequences (e.g. a messenger RNA (mRNA)).

[0295] In some embodiments of the compositions and methods of the disclosure, the RNA molecule of the disclosure comprises or consists of a sequence derived from a non-coding sequence (e.g. a non-coding RNA (ncRNA)). In some embodiments, the RNA molecule of the disclosure comprises or consists of a ribosomal RNA. In some embodiments, the RNA molecule of the disclosure comprises or consists of a small ncRNA molecule. Exemplary small RNA molecules of the disclosure include, but are not limited to, microRNAs (miRNAs), small interfering (siRNAs), piwi-interacting RNAs (piRNAs), small nucleolar RNAs (snoRNAs), small nuclear RNAs (snRNAs), extracellular or exosomal RNAs (exRNAs), and small Cajal body-specific RNAs (scaRNAs). In some embodiments, the RNA molecule of the disclosure comprises or consists of a long ncRNA molecule. Exemplary long RNA molecules of the disclosure include, but are not limited to, X-inactive specific transcript (Xist) and HOX transcript antisense RNA (HOTAIR).

[0296] In some embodiments of the compositions and methods of the disclosure, the RNA molecule of the disclosure contacted by a composition of the disclosure in an intracellular space. In some embodiments, the RNA molecule of the disclosure contacted by a composition of the disclosure in a cytosolic space. In some embodiments, the RNA molecule of the disclosure contacted by a composition of the disclosure in a nucleus. In some embodiments, the RNA molecule of the disclosure contacted by a composition of the disclosure in a vesicle, membrane-bound compartment of a cell, or an organelle.

[0297] In some embodiments of the compositions and methods of the disclosure, the RNA molecule of the disclosure contacted by a composition of the disclosure in an extracellular space. In some embodiments, the RNA molecule of the disclosure contacted by a composition of the disclosure in an exosome. In some embodiments, the RNA molecule of the disclosure contacted by a composition of the disclosure in a liposome, a polymersome, a micelle or a nanoparticle. In some embodiments, the RNA molecule of the disclosure contacted by a composition of the disclosure in an extracellular matrix. In some embodiments, the RNA molecule of the disclosure contacted by a composition of the disclosure in a droplet. In some embodiments, the RNA molecule of the disclosure contacted by a composition of the disclosure in a microfluidic droplet.

[0298] In some embodiments of the compositions and methods of the disclosure, a RNA molecule of the disclosure comprises or consists of a single-stranded sequence. In some embodiments, the RNA molecule of the disclosure comprises or consists of a double-stranded sequence. In some embodiments, the double-stranded sequence comprises two RNA molecules. In some embodiments, the double-stranded sequence comprises one RNA molecule and one DNA molecule. In some embodiments, including those wherein the double-stranded sequence comprises one RNA molecule and one DNA molecule, compositions of the disclosure selectively bind and, optionally, selectively cut the RNA molecule.

### Fusion Proteins

[0299] In some embodiments of the compositions and methods of the disclosure, the composition comprises a sequence encoding a target RNA-binding fusion protein comprising (a) a sequence encoding a first RNA-binding polypeptide or portion thereof; and (b) a sequence encoding a second RNA-binding polypeptide, wherein the first RNA-biding polypeptide binds a target RNA, and wherein the second RNA-binding polypeptide comprises RNA-nuclease activity.

[0300] In some embodiments, a target RNA-binding fusion protein is an RNA-guided target RNA-binding fusion protein. RNA-guided target RNA-binding fusion proteins comprise at least one RNA-binding polypeptide which corresponds to a gRNA which guides the RNA-binding polypeptide to target RNA. RNA-guided target RNA-binding fusion proteins include without limitation, RNA-binding polypeptides which are CRISPR/Cas-based RNA-binding polypeptides or portions thereof.

[0301] In some embodiments, a target RNA-binding fusion protein is not an RNA-guided target RNA-binding fusion protein and as such comprises at least one RNA-binding polypeptide which is capable of binding a target RNA without a corresponding gRNA sequence. Such non-guided RNA-binding polypeptides include, without limitation, at least one RNA-binding protein or RNA-binding portion thereof which is a PUF (Pumilio and FBF homology family). This type RNA-binding polypeptide can be used in place of a gRNA-guided RNA binding protein such as CRISPR/Cas. The unique RNA recognition mode of PUF proteins (named for Drosophila Pumilio and C. elegans fem-3 binding factor) that are involved in mediating mRNA stability and translation are well known in the art. The PUF domain of human Pumilio1, also known in the art, binds tightly to cognate RNA sequences and its specificity can be modified. It contains eight PUF repeats that recognize eight consecutive RNA bases with each repeat recognizing a single base. Since two amino acid side chains in each repeat recognize the Watson-Crick edge of the corresponding base and determine the specificity of that repeat, a PUF domain can be designed to specifically bind most 8-nt RNA. Wang et al., Nat Methods. 2009; 6(11): 825-830. See also WO2012/068627 which is incorporated by reference herein in its entirety.

[0302] In some embodiments of the non-guided RNA-binding fusion proteins of the disclosure, the fusion protein comprises at least one RNA-binding protein or RNA-binding portion thereof which is a PUMBY (Pumilio-based assembly) protein. RNA-binding protein PumHD (Pumilio homology domain, a member of the PUF family), which has been widely used in native and modified form for targeting RNA, has been engineered to yield a set of four canonical protein modules, each of which targets one RNA base. These modules (i.e., Pumby, for Pumilio-based assembly) can be concatenated in chains of varying composition and length, to bind desired target RNAs. The specificity of such Pumby—RNA interactions is high, with undetectable binding of a Pumby chain to RNA sequences that bear three or more mismatches from the target sequence. Katarzyna et al., PNAS, 2016; 113(19): E2579-E2588. See also US 2016/0238593 which is incorporated by reference herein in its entirety.

[0303] In some embodiments of the compositions of the disclosure, at least one of the RNA-binding proteins or RNA-binding portions thereof is a PPR protein. PPR proteins (proteins with pentatricopeptide repeat (PPR) motifs derived from plants) are nuclear-encoded and exclusively controlled at the RNA level organelles (chloroplasts and mitochondria), cutting, translation, splicing, RNA editing, genes specifically acting on RNA stability. PPR proteins are typically a motif of 35 amino acids and have a structure in which a PPR motif is about 10 contiguous amino acids. The combination of PPR motifs can be used for sequence-selective binding to RNA. PPR proteins are often comprised of PPR motifs of about 10 repeat domains. PPR domains or RNA-binding domains may be configured to be catalytically inactive. WO 2013/058404 incorporated herein by reference in its entirety.

[0304] In some embodiments, the fusion protein disclosed herein comprises a linker between the at least two RNA-binding polypeptides. In some embodiments, the linker is a peptide linker. In some embodiments, the peptide linker comprises one or more repeats of the tri-peptide GGS. In other embodiments, the linker is a non-peptide linker. In some embodiments, the non-peptide linker comprises polyethylene glycol (PEG), polypropylene glycol (PPG), co-poly(ethylene/propylene) glycol, polyoxyethylene (POE), polyurethane, polyphosphazene, polysaccharides, dextran, polyvinyl alcohol, polyvinylpyrrolidones, polyvinyl ethyl ether, polyacryl amide, polyacrylate, polycyanoacrylates, lipid polymers, chitins, hyaluronic acid, heparin, or an alkyl linker.

[0305] In some embodiments, the at least one RNA-binding protein does not require multimerization for RNA-binding activity. In some embodiments, the at least one RNA-binding protein is not a monomer of a multimer complex. In some embodiments, a multimer protein complex does not comprise the RNA binding protein. In some embodiments, the at least one of RNA-binding protein selectively binds to a target sequence within the RNA molecule. In some embodiments, the at least one RNA-binding protein does not comprise an affinity for a second sequence within the RNA molecule. In some embodiments, the at least one RNA-binding protein does not comprise a high affinity for or selectively bind a second sequence within the RNA molecule. In some embodiments, the at least one RNA-binding protein comprises between 2 and 1300 amino acids, inclusive of the endpoints.

[0306] In some embodiments, the sequence encoding the at least one RNA-binding protein of the fusion proteins disclosed herein further comprises a sequence encoding a nuclear localization signal (NLS). In some embodiments, the sequence encoding a nuclear localization signal (NLS) is positioned 3′ to the sequence encoding the RNA binding protein. In some embodiments, the at least one RNA-binding protein comprises an NLS at a C-terminus of the protein. In some embodiments, the sequence encoding the at least one RNA-binding protein further comprises a first sequence encoding a first NLS and a second sequence encoding a second NLS. In some embodiments, the sequence encoding the first NLS or the second NLS is positioned 3′ to the sequence encoding the RNA-binding protein. In some embodiments, the at least one RNA-binding protein comprises the first NLS or the second NLS at a C-terminus of the protein. In some embodiments, the at least one RNA-binding protein further comprises an NES (nuclear export signal) or other peptide tag or secretory signal.

[0307] In some embodiments, a fusion protein disclosed herein comprises the at least one RNA-binding protein as a first RNA-binding protein together with a second RNA-binding protein comprising or consisting of a nuclease domain. In some embodiments, the second RNA binding protein binds RNA in a manner in which it associates with RNA. In some embodiments, the second RNA binding protein associates with RNA in a manner in which it cleaves RNA.

[0308] In some embodiments, the second RNA-binding polypeptide is operably configured to the first RNA-binding polypeptide at the C-terminus of the first RNA-binding polypeptide. In some embodiments, the second RNA-binding polypeptide is operably configured to the first RNA-binding polypeptide at the N-terminus of the first RNA-binding polypeptide.

### Vectors

[0309] In some embodiments of the compositions and methods of the disclosure, a vector comprises a guide RNA of the disclosure. In some embodiments, the vector comprises at least one guide RNA of the disclosure. In some embodiments, the vector comprises one or more guide RNA(s) of the disclosure. In some embodiments, the vector comprises two or more guide RNAs of the disclosure. In some embodiments, the vector further comprises a fusion protein of the disclosure. In some embodiments, the fusion protein comprises a first RNA binding protein and a second RNA binding protein.

[0310] In some embodiments of the compositions and methods of the disclosure, a first vector comprises a guide RNA of the disclosure and a second vector comprises a fusion protein of the disclosure. In some embodiments, the first vector comprises at least one guide RNA of the disclosure. In some embodiments, the first vector comprises one or more guide RNA(s) of the disclosure. In some embodiments, the first vector comprises two or more guide RNA(s) of the disclosure. In some embodiments, the fusion protein comprises a first RNA binding protein and a second RNA binding protein. In some embodiments, the first vector and the second vector are identical. In some embodiments, the first vector and the second vector are not identical.

[0311] In some embodiments of the compositions and methods of the disclosure, the vector is or comprises a component of a “2-component RNA targeting system” comprising (a) nucleic acid sequence encoding a RNA-targeted fusion protein of the disclosure; and (b) a single guide RNA (sgRNA) sequence comprising: on its 5′ end, an RNA sequence (e.g., spacer sequence) that hybridizes to or specifically binds to a target RNA sequence; and on its 3′ end, an RNA sequence (e.g., scaffold sequence) capable of specifically binding to or associating with the CRISPR/Cas protein of the fusion protein; and wherein the 2-component RNA targeting system recognizes and alters the target RNA in a cell in the absence of a PAMmer. In some embodiments, the sequences of the 2-component system are comprised within a single (e.g., unitary) vector. In some embodiments, the spacer sequence of the 2-component system targets a repeat sequence selected from the group consisting of CUG, CCUG, CAG, and GGGGCC. In some embodiments, the spacer sequence of the 2-component system targets an RNA sequence involved in an adaptive immune response. In some embodiments, a spacer sequence of the 2-component system comprises a portion of a nucleic acid sequence encoding a protein component of an adaptive immune response, and wherein the protein component is selected from the group consisting of Beta-2-microglobulin β2M), Human Leukocyte Antigen A (HLA-A), Human Leukocyte Antigen B (HLA-B), Human Leukocyte Antigen C (HLA-C), Cluster of Differentiation 28 (CD28), Cluster of Differentiation 80 (CD80), Cluster of Differentiation 86 (CD86), Inducible T-cell Costimulator (ICOS), ICOS Ligand (ICOSLG), OX40L, Interleukin 12 (IL12), and CC Chemokine Receptor 7 (CCR7). In some embodiments, the 2-component system comprises a spacer which is a portion of a nucleic acid sequence encoding a protein component of an adaptive immune response and which is about 20 or 21 nucleotides in length. In some embodiments, the 2-component system comprises a first and second spacer comprised within a singular gRNA. In some embodiments, the 2-component system comprises a first and second spacer sequence comprised within first and second gRNA sequences. In some embodiments, the first spacer targets a repeat sequence and the second spacer targets RNA involved in an adaptive immune response.

[0312] In some embodiments of the compositions and methods of the disclosure, a vector of the disclosure is a viral vector. In some embodiments, the viral vector comprises a sequence isolated or derived from a retrovirus. In some embodiments, the viral vector comprises a sequence isolated or derived from a lentivirus. In some embodiments, the viral vector comprises a sequence isolated or derived from an adenovirus. In some embodiments, the viral vector comprises a sequence isolated or derived from an adeno-associated virus (AAV). In some embodiments, the viral vector is replication incompetent. In some embodiments, the viral vector is isolated or recombinant. In some embodiments, the viral vector is self-complementary.

[0313] In some embodiments of the compositions and methods of the disclosure, the viral vector comprises a sequence isolated or derived from an adeno-associated virus (AAV). In some embodiments, the viral vector comprises an inverted terminal repeat sequence or a capsid sequence that is isolated or derived from an AAV of serotype AAV1, AAV2, AAV3, AAV4, AAV5, AAV6, AAV7, AAV8, AAV9, AAV10, AAV11 or AAV12.In some embodiments, the viral vector is replication incompetent. In some embodiments, the viral vector is isolated or recombinant (rAAV). In some embodiments, the viral vector is self-complementary (scAAV).

[0314] In some embodiments of the compositions and methods of the disclosure, a vector of the disclosure is a non-viral vector. In some embodiments, the vector comprises or consists of a nanoparticle, a micelle, a liposome or lipoplex, a polymersome, a polyplex or a dendrimer. In some embodiments, the vector is an expression vector or recombinant expression system. As used herein, the term “recombinant expression system” refers to a genetic construct for the expression of certain genetic material formed by recombination.

[0315] In some embodiments of the compositions and methods of the disclosure, an expression vector, viral vector or non-viral vector provided herein, includes without limitation, an expression control element. An “expression control element” as used herein refers to any sequence that regulates the expression of a coding sequence, such as a gene. Exemplary expression control elements include but are not limited to promoters, enhancers, microRNAs, post-transcriptional regulatory elements, polyadenylation signal sequences, and introns. Expression control elements may be constitutive, inducible, repressible, or tissue-specific, for example. A “promoter” is a control sequence that is a region of a polynucleotide sequence at which initiation and rate of transcription are controlled. It may contain genetic elements at which regulatory proteins and molecules may bind such as RNA polymerase and other transcription factors. In some embodiments, expression control by a promoter is tissue-specific. Non-limiting exemplary promoters include CMV, CBA, CAG, Cbh, EF-1a, PGK, UBC, GUSB, UCOE, hAAT, TBG, Desmin, MCK, C5-12, NSE, Synapsin, PDGF, MecP2, CaMKII, mGluR2, NFL, NFH, nβ2, PPE, ENK, EAAT2, GFAP, MBP, and U6 promoters. An “enhancer” is a region of DNA that can be bound by activating proteins to increase the likelihood or frequency of transcription. Non-limiting exemplary enhancers and posttranscriptional regulatory elements include the CMV enhancer and WPRE.

[0316] In some embodiments of the compositions and methods of the disclosure, an expression vector, viral vector or non-viral vector provided herein, includes without limitation, vector elements such as an IRES or 2A peptide sites for configuration of “multicistronic” or “polycistronic” or “bicistronic” or tricistronic” constructs, i.e., having double or triple or multiple coding areas or exons, and as such will have the capability to express from mRNA two or more proteins from a single construct. Multicistronic vectors simultaneously express two or more separate proteins from the same mRNA. The two strategies most widely used for constructing multicistronic configurations are through the use of an IRES or a 2A self-cleaving site. An “IRES” refers to an internal ribosome entry site or portion thereof of viral, prokaryotic, or eukaryotic origin which are used within polycistronic vector constructs. In some embodiments, an IRES is an RNA element that allows for translation initiation in a cap-independent manner. The term “self-cleaving peptides” or “sequences encoding self-cleaving peptides” or “2A self-cleaving site” refer to linking sequences which are used within vector constructs to incorporate sites to promote ribosomal skipping and thus to generate two polypeptides from a single promoter, such self-cleaving peptides include without limitation, T2A, and P2A peptides or sequences encoding the self-cleaving peptides.

[0317] In some embodiments, the vector is a viral vector. In some embodiments, the vector is an adenoviral vector, an adeno-associated viral (AAV) vector, or a lentiviral vector. In some embodiments, the vector is a retroviral vector, an adenoviral/retroviral chimera vector, a herpes simplex viral I or II vector, a parvoviral vector, a reticuloendotheliosis viral vector, a polioviral vector, a papillomaviral vector, a vaccinia viral vector, or any hybrid or chimeric vector incorporating favorable aspects of two or more viral vectors. In some embodiments, the vector further comprises one or more expression control elements operably linked to the polynucleotide. In some embodiments, the vector further comprises one or more selectable markers. In some embodiments, the AAV vector has low toxicity. In some embodiments, the AAV vector does not incorporate into the host genome, thereby having a low probability of causing insertional mutagenesis. In some embodiments, the AAV vector can encode a range total of polynucleotides from 4.5 kb to 4.75 kb. In some embodiments, exemplary AAV vectors that may be used in any of the herein described compositions, systems, methods, and kits can include an AAV1 vector, a modified AAV1 vector, an AAV2 vector, a modified AAV2 vector, an AAV3 vector, a modified AAV3 vector, an AAV4 vector, a modified AAV4 vector, an AAV5 vector, a modified AAV5 vector, an AAV6 vector, a modified AAV6 vector, an AAV7 vector, a modified AAV7 vector, an AAV8 vector, an AAV9 vector, an AAV.rh10 vector, a modified AAV.rh10 vector, an AAV.rh32/33 vector, a modified AAV.rh32/33 vector, an AAV.rh43 vector, a modified AAV.rh43 vector, an AAV.rh64R1 vector, and a modified AAV.rh64R1 vector and any combinations or equivalents thereof. In some embodiments, the lentiviral vector is an integrase-competent lentiviral vector (ICLV). In some embodiments, the lentiviral vector can refer to the transgene plasmid vector as well as the transgene plasmid vector in conjunction with related plasmids (e.g., a packaging plasmid, a rev expressing plasmid, an envelope plasmid) as well as a lentiviral-based particle capable of introducing exogenous nucleic acid into a cell through a viral or viral-like entry mechanism. Lentiviral vectors are well-known in the art (see, e.g., Trono D. (2002) Lentiviral vectors, New York: Spring-Verlag Berlin Heidelberg and Durand et al. (2011) Viruses 3(2):132-159 doi: 10.3390/v3020132). In some embodiments, exemplary lentiviral vectors that may be used in any of the herein described compositions, systems, methods, and kits can include a human immunodeficiency virus (HIV) 1 vector, a modified human immunodeficiency virus (HIV) 1 vector, a human immunodeficiency virus (HIV) 2 vector, a modified human immunodeficiency virus (HIV) 2 vector, a sooty mangabey simian immunodeficiency virus (SIV_{SM}) vector, a modified sooty mangabey simian immunodeficiency virus (SIV_{SM}) vector, a African green monkey simian immunodeficiency virus (SIV_{AGM}) vector, a modified African green monkey simian immunodeficiency virus (SIV_{AGM}) vector, an equine infectious anemia virus (EIAV) vector, a modified equine infectious anemia virus (EIAV) vector, a feline immunodeficiency virus (FIV) vector, a modified feline immunodeficiency virus (FIV) vector, a Visna/maedi virus (VNV/VMV) vector, a modified Visna/maedi virus (VNV/VMV) vector, a caprine arthritis-encephalitis virus (CAEV) vector, a modified caprine arthritis-encephalitis virus (CAEV) vector, a bovine immunodeficiency virus (BIV), or a modified bovine immunodeficiency virus (BIV).

### Nucleic Acids

[0318] Provided herein are the nucleic acid sequences encoding the fusion proteins disclosed herein for use in gene transfer and expression techniques described herein. It should be understood, although not always explicitly stated that the sequences provided herein can be used to provide the expression product as well as substantially identical sequences that produce a protein that has the same biological properties. These “biologically equivalent” or “biologically active” or “equivalent” polypeptides are encoded by equivalent polynucleotides as described herein. They may possess at least 60%, or alternatively, at least 65%, or alternatively, at least 70%, or alternatively, at least 75%, or alternatively, at least 80%, or alternatively at least 85%, or alternatively at least 90%, or alternatively at least 95% or alternatively at least 98%, identical primary amino acid sequence to the reference polypeptide when compared using sequence identity methods run under default conditions. Specific polypeptide sequences are provided as examples of particular embodiments. Modifications to the sequences to amino acids with alternate amino acids that have similar charge. Additionally, an equivalent polynucleotide is one that hybridizes under stringent conditions to the reference polynucleotide or its complement or in reference to a polypeptide, a polypeptide encoded by a polynucleotide that hybridizes to the reference encoding polynucleotide under stringent conditions or its complementary strand. Alternatively, an equivalent polypeptide or protein is one that is expressed from an equivalent polynucleotide.

[0319] The nucleic acid sequences (e.g., polynucleotide sequences) disclosed herein may be codon-optimized which is a technique well known in the art. In some embodiments disclosed herein, exemplary Cas sequences, such as e.g., SEQ ID NO: 46 (Cas13d), are codon optimized for expression in human cells. Codon optimization refers to the fact that different cells differ in their usage of particular codons. This codon bias corresponds to a bias in the relative abundance of particular tRNAs in the cell type. By altering the codons in the sequence to match with the relative abundance of corresponding tRNAs, it is possible to increase expression. It is also possible to decrease expression by deliberately choosing codons for which the corresponding tRNAs are known to be rare in a particular cell type. Codon usage tables are known in the art for mammalian cells, as well as for a variety of other organisms. Based on the genetic code, nucleic acid sequences coding for, e.g., a Cas protein, can be generated. In some embodiments, such a sequence is optimized for expression in a host or target cell, such as a host cell used to express the Cas protein or a cell in which the disclosed methods are practiced (such as in a mammalian cell, e.g., a human cell). Codon preferences and codon usage tables for a particular species can be used to engineer isolated nucleic acid molecules encoding a Cas protein (such as one encoding a protein having at least 80%, at least 85%, at least 90%, at least 92%, at least 95%, at least 96%, at least 97%, at least 98%, at least 99%, or 100% sequence identity to its corresponding wild-type protein) that takes advantage of the codon usage preferences of that particular species. For example, the Cas proteins disclosed herein can be designed to have codons that are preferentially used by a particular organism of interest. In one example, a Cas nucleic acid sequence is optimized for expression in human cells, such as one having at least 70%, at least 80%, at least 85%, at least 90%, at least 92%, at least 95%, at least 98%, or at least 99% sequence identity to its corresponding wild-type or originating nucleic acid sequence. In some embodiments, an isolated nucleic acid molecule encoding at least one Cas protein (which can be part of a vector) includes at least one Cas protein coding sequence that is codon optimized for expression in a eukaryotic cell, or at least one Cas protein coding sequence codon optimized for expression in a human cell. In one embodiment, such a codon optimized Cas coding sequence has at least 80%, at least 85%, at least 90%, at least 92%, at least 95%, at least 96%, at least 97%, at least 98%, at least 99%, or 100% sequence identity to its corresponding wild-type or originating sequence. In another embodiment, a eukaryotic cell codon optimized nucleic acid sequence encodes a Cas protein having at least 85%, at least 90%, at least 92%, at least 95%, at least 96%, at least 97%, at least 98%, at least 99%, or 100% sequence identity to its corresponding wild-type or originating protein. In another embodiment, a variety of clones containing functionally equivalent nucleic acids may be routinely generated, such as nucleic acids which differ in sequence but which encode the same Cas protein sequence. Silent mutations in the coding sequence result from the degeneracy (i.e., redundancy) of the genetic code, whereby more than one codon can encode the same amino acid residue. Thus, for example, leucine can be encoded by CTT, CTC, CTA, CTG, TTA, or TTG; serine can be encoded by TCT, TCC, TCA, TCG, AGT, or AGC; asparagine can be encoded by AAT or AAC; aspartic acid can be encoded by GAT or GAC; cysteine can be encoded by TGT or TGC; alanine can be encoded by GCT, GCC, GCA, or GCG; glutamine can be encoded by CAA or CAG; tyrosine can be encoded by TAT or TAC; and isoleucine can be encoded by ATT, ATC, or ATA. Tables showing the standard genetic code can be found in various sources (see, for example, Stryer, 1988, Biochemistry, 3.sup.rd Edition, W. H. 5 Freeman and Co., N.Y.).

[0320] “Hybridization” refers to a reaction in which one or more polynucleotides react to form a complex that is stabilized via hydrogen bonding between the bases of the nucleotide residues. The hydrogen bonding may occur by Watson-Crick base pairing, Hoogstein binding, or in any other sequence-specific manner. The complex may comprise two strands forming a duplex structure, three or more strands forming a multi-stranded complex, a single self-hybridizing strand, or any combination of these. A hybridization reaction may constitute a step in a more extensive process, such as the initiation of a PC reaction, or the enzymatic cleavage of a polynucleotide by a ribozyme.

[0321] Examples of stringent hybridization conditions include: incubation temperatures of about 25° C. to about 37° C.; hybridization buffer concentrations of about 6× SSC to about 10× SSC; formamide concentrations of about 0% to about 25%; and wash solutions from about 4× SSC to about 8× SSC. Examples of moderate hybridization conditions include: incubation temperatures of about 40° C. to about 50° C.; buffer concentrations of about 9× SSC to about 2× SSC; formamide concentrations of about 30% to about 50%; and wash solutions of about 5× SSC to about 2× SSC. Examples of high stringency conditions include: incubation temperatures of about 55° C. to about 68° C.; buffer concentrations of about 1× SSC to about 0.1× SSC; formamide concentrations of about 55% to about 75%; and wash solutions of about lx SSC, 0.1x SSC, or deionized water. In general, hybridization incubation times are from 5 minutes to 24 hours, with 1, 2, or more washing steps, and wash incubation times are about 1, 2, or 15 minutes. SSC is 0.15 M NaCl and 15 mM citrate buffer. It is understood that equivalents of SSC using other buffer systems can be employed.
[0322] “Homology” or “identity” or “similarity” refers to sequence similarity between two peptides or between two nucleic acid molecules. Homology can be determined by comparing a position in each sequence which may be aligned for purposes of comparison. When a position in the compared sequence is occupied by the same base or amino acid, then the molecules are homologous at that position. A degree of homology between sequences is a function of the number of matching or homologous positions shared by the sequences. An “unrelated” or “non-homologous” sequence shares less than 40% identity, or alternatively less than 25% identity, with one of the sequences of the present invention.

### Cells

[0323] In some embodiments of the compositions and methods of the disclosure, a cell of the disclosure is a prokaryotic cell.

[0324] In some embodiments of the compositions and methods of the disclosure, a cell of the disclosure is a eukaryotic cell. In some embodiments, the cell is a mammalian cell. In some embodiments, the cell is a bovine, murine, feline, equine, porcine, canine, simian, or human cell. In some embodiments, the cell is a non-human mammalian cell such as a non-human primate cell.

[0325] In some embodiments, a cell of the disclosure is a somatic cell. In some embodiments, a cell of the disclosure is a germline cell. In some embodiments, a germline cell of the disclosure is not a human cell.

[0326] In some embodiments of the compositions and methods of the disclosure, a cell of the disclosure is a stem cell. In some embodiments, a cell of the disclosure is an embryonic stem cell. In some embodiments, an embryonic stem cell of the disclosure is not a human cell. In some embodiments, a cell of the disclosure is a multipotent stem cell or a pluripotent stem cell. In some embodiments, a cell of the disclosure is an adult stem cell. In some embodiments, a cell of the disclosure is an induced pluripotent stem cell (iPSC). In some embodiments, a cell of the disclosure is a hematopoetic stem cell (HSC).

[0327] In some embodiments of the compositions and methods of the disclosure, a somatic cell of the disclosure is an immune cell. In some embodiments, an immune cell of the disclosure is a lymphocyte. In some embodiments, an immune cell of the disclosure is a T lymphocyte (also referred to herein as a T-cell). Exemplary T-cells of the disclosure include, but are not limited to, naive T cells, effector T cells, helper T cells, memory T cells, regulatory T cells (Tregs) and Gamma delta T cells. In some embodiments, an immune cell of the disclosure is a B lymphocyte. In some embodiments, an immune cell of the disclosure is a natural killer cell. In some embodiments, an immune cell of the disclosure is an antigen-presenting cell.

[0328] In some embodiments of the compositions and methods of the disclosure, a somatic cell of the disclosure is a muscle cell. In some embodiments, a muscle cell of the disclosure is a myoblast or a myocyte. In some embodiments, a muscle cell of the disclosure is a cardiac muscle cell, skeletal muscle cell or smooth muscle cell. In some embodiments, a muscle cell of the disclosure is a striated cell.

[0329] In some embodiments of the compositions and methods of the disclosure, a somatic cell of the disclosure is an epithelial cell. In some embodiments, an epithelial cell of the disclosure forms a squamous cell epithelium, a cuboidal cell epithelium, a columnar cell epithelium, a stratified cell epithelium, a pseudostratified columnar cell epithelium or a transitional cell epithelium. In some embodiments, an epithelial cell of the disclosure forms a gland including, but not limited to, a pineal gland, a thymus gland, a pituitary gland, a thyroid gland, an adrenal gland, an apocrine gland, a holocrine gland, a merocrine gland, a serous gland, a mucous gland and a sebaceous gland. In some embodiments, an epithelial cell of the disclosure contacts an outer surface of an organ including, but not limited to, a lung, a spleen, a stomach, a pancreas, a bladder, an intestine, a kidney, a gallbladder, a liver, a larynx or a pharynx. In some embodiments, an epithelial cell of the disclosure contacts an outer surface of a blood vessel or a vein.

[0330] In some embodiments of the compositions and methods of the disclosure, a somatic cell of the disclosure is a neuronal cell. In some embodiments, a neuron cell of the disclosure is a neuron of the central nervous system. In some embodiments, a neuron cell of the disclosure is a neuron of the brain or the spinal cord. In some embodiments, a neuron cell of the disclosure is a neuron of the retina. In some embodiments, a neuron cell of the disclosure is a neuron of a cranial nerve or an optic nerve. In some embodiments, a neuron cell of the disclosure is a neuron of the peripheral nervous system. In some embodiments, a neuron cell of the disclosure is a neuroglial or a glial cell. In some embodiments, a glial of the disclosure is a glial cell of the central nervous system including, but not limited to, oligodendrocytes, astrocytes, ependymal cells, and microglia. In some embodiments, a glial of the disclosure is a glial cell of the peripheral nervous system including, but not limited to, Schwann cells and satellite cells.

[0331] In some embodiments of the compositions and methods of the disclosure, a somatic cell of the disclosure is a primary cell.

[0332] In some embodiments of the compositions and methods of the disclosure, a somatic cell of the disclosure is a cultured cell.

[0333] In some embodiments of the compositions and methods of the disclosure, a somatic cell of the disclosure is in vivo, in vitro, ex vivo or in situ.

[0334] In some embodiments of the compositions and methods of the disclosure, a somatic cell of the disclosure is autologous or allogeneic.

### Masking Modified Cells of the Disclosure

[0335] Compositions of the disclosure simultaneously deliver a gene therapy and prevent expression of antigens derived from the gene therapy construct or associated delivery vector from display on the surface of a modified cell of the disclosure.

[0336] By inhibiting or reducing expression of a component of an adaptive immune response in the modified cell, the modified cell is invisible to a host immune system. For example, compositions of the disclosure may simultaneously target an RNA molecule associated with a genetic disease or disorder and an RNA molecule that encodes the β2M subunit of the MEW I. By selectively targeting an RNA molecule that encodes the β2M subunit of the MHC I, the composition prevents the modified cell from displaying one or more antigen peptides derived from an RNA targeting construct, vector, or combination thereof on the surface of the modified cell. Consequently, a subject's immune system does not identify the modified cell as containing foreign sequences and does not attempt to mount an immune response directed at the modified cell. This method increases the therapeutic efficacy of the treatment of the genetic disease or disorder while avoiding a common side effect of gene therapy.

[0337] In some embodiments of the compositions and methods of the disclosure, the component of an adaptive immune response comprises or consists of a component of a type I major histocompatibility complex (MEW I), a type II major histocompatibility complex (MHC II), a T-cell receptor (TCR), a costimulatory molecule or a combination thereof. In some embodiments, the MHC I component comprises an α1 chain, an α2 chain, an α3 chain, or a β2M protein. In some embodiments, the component of an adaptive immune response comprises or consists of an MEW I β2M protein. In some embodiments, the MHC II component comprises an α1 chain, an α2 chain, a α1 chain, or a α2 chain. In some embodiments, the TCR component comprises an α-chain and a β-chain. In some embodiments, the costimulatory molecule comprises a Cluster of Differentiation 28 (CD28), a Cluster of Differentiation 80 (CD80), a Cluster of Differentiation 86 (CD86), an Inducible T-cell COStimulator (ICOS), or an ICOS Ligand (ICOSLG) protein.

[0338] An α-chain of an MHC I may be encoded by an HLA gene, including but not limited to, HLA-A, HLA-B and HLA-C.

[0339] Compositions of the disclosure may comprise a gRNA comprising a spacer sequence that specifically binds to a target sequence of an RNA molecule encoding an α-chain derived from an HLA-A gene comprising or consisting of 20 nucleotides of the sequence of

| (SEQ ID NO: 216) | |
|---|---|
| 1 | atggccgtca tggcgccccg aaccctcgtc ctgctactct cgggggctct ggccctgacc |
| 61 | cagacctggg cgggctctca ctccatgagg tatttcttca catccgtgtc ccggcccggc |
| 121 | cgcggggagc cccgcttcat cgcagtgggc tacgtggacg acacgcagtt cgtgcggttc |
| 181 | gacagcgacg ccgcgagcca gaggatggag ccgcgggcgc cgtggataga gcaggagggt |
| 241 | ccggagtatt gggacgggga gacacggaaa gtgaaggccc actcacagac tcaccgagtg |
| 301 | gacctgggga ccctgcgcgg ctactacaac cagagcgagg ccggttctca caccgtccag |
| 361 | aggatgtgtg gctgcgacgt ggggtcggac tggcgcttcc tccgcgggta ccaccagtac |
| 421 | gcctacgacg gcaaggatta catcgccctg aaagaggacc tgcgctcttg gaccgcggcg |
| 481 | gacatggcag ctcagaccac caagcacaag tgggaggcgg cccatgtggc ggagcagttg |
| 541 | agagcctacc tggagggcac gtgcgtggag tggctccgca gatacctgga gaacgggaag |
| 601 | gagacgctgc agcgcacgga cgcccccaaa acgcatatga ctcaccacgc tgtctctgac |
| 661 | catgaagcca ccctgaggtg ctgggccctg agcttctacc ctgcggagat cacactgacc |
| 721 | tggcagcggg atggggagga ccagacccag gacacggagc tcgtggagac caggcctgca |
| 781 | ggggatggaa ccttccagaa gtgggcggct gtggtggtgc cttctggaca ggagcagaga |
| 841 | taaacctgcc atgtgcagca tgagggtttg cccaagcccc tcaccctgag atgggagccg |
| 901 | tcttcccagc ccaccatccc catcgtgggc atcattgctg gcctggttct ctttggagct |
| 961 | gtgatcactg gagctgtggt cgctgctgtg atgtggagga ggaagagctc agatagaaaa |
| 1021 | ggagggagct actctcaggc tgcaagcagt gacagtgccc agggctctga tgtgtctctc |
| 1081 | acagcttgta aagtgtga. |

[0340] Compositions of the disclosure may comprise a gRNA comprising a spacer sequence that specifically binds to a target sequence of an RNA molecule encoding an α-chain derived from an HLA-B gene comprising or consisting of 20 nucleotides of the sequence of

| (SEQ ID NO: 217) | |
|---|---|
| 1 | tggtgtagga gaagagggat caggacgaag tcccaggccc cgggcggggc tctcagggtc |
| 61 | tcaggctccg agggccgcgt ctgcaatggg gaggcgcagc gttggggatt ccccactccc |
| 121 | acgagtttca cttcttctcc caacctatgt cgggtccttc ttccaggata ctcgtgacgc |
| 181 | gtccccattt cccactccca ttgggtgtcg ggtgtctaga gaagccaatc agcgtcgccg |
| 241 | tggtcccagt tctaaagtcc ccacgcaccc acccggactc agaatctcct cagacgccga |
| 301 | gatgcgggtc acggcacccc gaaccgtcct cctgctgctc tcggcggccc tggccctgac |
| 361 | cgagacctgg gccggtgagt gcgggtcggc agggaaatgg cctctgtggg gaggagcgag |
| 421 | gggaccgcag gcgggggcgc aggacccggg gagccgcgcc gggaggaggg tcgggcgggt |
| 481 | ctcagcccct cctcgccccc aggctcccac tccatgaggt atttccacac cgccatgtcc |
| 541 | cggcccggcc gcggggagcc ccgcttcatc accgtgggct acgtggacga cacgctgttc |
| 601 | gtgaggttcg acagcgacgc cacgagtccg aggaaggagc cgcgggcgcc atggatagag |
| 661 | caggaggggc cggagtattg ggaccgggag acacagatct ccaagaccaa cacacagact |
| 721 | taccgagaga gcctgcggaa cctgcgcggc tactacaacc agagcgaggc cggtgagtga |
| 781 | ccccggcccg gggcgcaggt cacgactccc catcccccac gtacggcccg ggtcgccccg |
| 841 | agtctccggg tccgagatcc gcccccctga ggccgcggga cccgcccaga ccctcgaccg |
| 901 | gcgagagccc caggcgcgtt tacccggttt cattttcagt tgaggccaaa atccccgcgg |
| 961 | gttggtcggg gcggggcggg gcggggctcg ggggacgggg ctgaccgcgg ggcctgggcc |
| 1021 | agggtctcac acttggcaga ggatgtatgg ctgcgacctg gggcccgacg ggcgcctcct |
| 1081 | ccgcgggtat aaccagttag cctacgacgg caaggattac atcgccctga acgaggacct |
| 1141 | gagctcctgg accgcggcgg acaccgcggc tcagatcacc cagcgcaagt gggaggcggc |
| 1201 | ccgtgtggcg gagcaggaca gagcctacct ggagggcctg tgcgtggagt cgctccgcag |
| 1261 | atacctggag aacgggaagg agacgctgca gcgcgcgggt accaggggca gtggggagcc |
| 1321 | ttccccatct cctataggtc gccggggatg gcctcccacg agaagaggag gaaaatggga |
| 1381 | tcagcgctag aatgtcgccc tcccttgaat ggagaatggc atgagttttc ctgagtttcc |
| 1441 | tctgagggcc ccctcttctc tctaggacaa taaggaatga cgtctctgag gaaatggagg |
| 1501 | ggaagacagt ccctagaata ctgatcaggg gtcccctttg acccctgcag cagccttggg |
| 1561 | aaccgtgact ttcctctcag gccttgttct ctgcctcaca ctcagtgtgt ttggggctct |
| 1621 | gattccagca cttctgagtc actttacctc cactcagatc gggagcagaa gtccctgttc |
| 1681 | cccgctcaga gactcgaact ttccaatgaa taggagatta tcccaggtgc ctgcgtccag |
| 1741 | gctggtgtct gggttctgtg ccccttcccc accccaggtg tcctgtccat tctcaggctg |
| 1801 | gtcacatggg tggtcctagg gtgtcccatg agagatgcaa agcgcctgaa ttttctgact |
| 1861 | cttcccatca gaccccccaa agacacatgt gacccaccac cccatctctg accatgaggc |
| 1921 | caccctgagg tgctgggccc tgggcttcta ccctgcggag atcacactga cctggcagcg |
| 1981 | ggatggcgag gaccaaactc aggacaccga gcttgtggag accagaccag caggagatag |
| 2041 | aaccttccag aagtgggcag ctgtggtggt gccttctgga gaagagcaga gatacacatg |
| 2101 | ccatgtacag catgaggggc tgccgaagcc cctcaccctg agatggggta aggaggggga |
| 2161 | tgaggggtca tatctgttct cagggaaagc aggagccctt ctggagccct tcagcagggt |
| 2221 | cagggcccct catcttcccc tcctttccca gagccatctt cccagtccac catccccatc |
| 2281 | gtgggcattg ttgctggcct ggctgtccta gcagttgtgg tcatcggagc tgtggtcgct |
| 2341 | actgtgatgt gtaggaggaa gagctcaggt agggaagggg tgaggggtgg ggtctgggtt |
| 2401 | ttcttgtccc actgggggtt tcaagcccca ggtagaagtg ttccctgcct cattactggg |
| 2461 | aagcagcatc cacacagggg ctaacgcagc ctgggaccct gtgtgccagc acttactctt |
| 2521 | ttgtgcagca catgtgacaa tgaaggacgg atgtatcgcc ttgatggttg tggtgttggg |
| 2581 | gtcctgattc cagcattcat gagtcagggg aaggtccctg ctaaggacag accttaggag |
| 2641 | ggcagttggt ccaggaccca cacttgcttt cctcgtgttt cctgatcctg ccttgggtct |
| 2701 | gtagtcatac ttctggaaat tccttttggt tccaagacga ggaggttcct ctaagatctc |
| 2761 | atggccctgc ttcctcccag tcccctcaca ggacattttc ttcccacagg tggaaaagga |
| 2821 | gggagctact ctcaggctgc gtgtaagtgg tgggggtggg agtgtggagg agctcaccca |
| 2881 | ccccataatt cctcctgtcc cacgtctcct gagggctctg accaggtcct gtttttgttc |
| 2941 | tactccagcc agcgacagtg cccagggctc tgatgtgtct ctcacagctt gaaaaggtga |
| 3001 | gattcttggg gtctagagtg ggtggggtgg cgggtctggg ggtgggtggg gcagtgggga |
| 3061 | aaggcctggg taatggagat tctttgattg ggatgtttcg cgtgtgtggt gggctgttca |
| 3121 | gagtgtcatc acttaccatg actaaccaga atttgttcat gactgttgtt ttctgtagcc |
| 3181 | tgagacagct gtcttgtgag ggactgagat gcaggatttc ttcacgcctc ccctttgtga |
| 3241 | cttcaagagc ctctggcatc tctttctgca aaggcacctg aatgtgtctg cgtccctgtt |
| 3301 | agcataatgt gaggaggtgg agagacagcc cacccttgtg tccactgtga cccctgttcg |
| 3361 | catgctgacc tgtgtttcct cccca. |

[0341] Compositions of the disclosure may comprise a gRNA comprising a spacer sequence that specifically binds to a target sequence of an RNA molecule encoding an α-chain derived from an HLA-C gene comprising or consisting of 20 nucleotides of the sequence of

| (SEQ ID NO: 218) | |
|---|---|
| 1 | tccgcagtcc cggttctaaa gtccccagtc acccacccgg actcacattc tccccagagg |
| 61 | ccgagatgcg ggtcatggcg ccccgagccc tcctcctgct gctctcggga ggcctggccc |
| 121 | tgaccgagac ctgggcctgc tcccactcca tgaggtattt cgacaccgcc gtgtcccggc |
| 181 | ccggccgcgg agagccccgc ttcatctcag tgggctacgt ggacgacacg cagttcgtgc |
| 241 | ggttcgacag cgacgccgcg agtccgagag gggagccgcg ggcgccgtgg gtggagcagg |
| 301 | aggggccgga gtattgggac cgggagacac agaagtacaa gcgccaggca caggctgacc |
| 361 | gagtgagcct gcggaacctg cgcggctact acaaccagag cgaggacggg tctcacaccc |
| 421 | tccagaggat gtctggctgc gacctggggc ccgacgggcg cctcctccgc gggtatgacc |
| 481 | agtccgccta cgacggcaag gattacatcg ccctgaacga ggacctgcgc tcctggaccg |
| 541 | ccgcggacac cgcggctcag atcacccagc gcaagttgga ggcggcccgt gcggcggagc |
| 601 | agctgagagc ctacctggag ggcacgtgcg tggagtggct ccgcagatac ctggagaacg |
| 661 | ggaaggagac gctgcagcgc gcagaacccc caaagacaca cgtgacccac caccccctct |
| 721 | ctgaccatga ggccaccctg aggtgctggg ccctgggctt ctaccctgcg gagatcacac |
| 781 | tgacctggca gcgggatggg gaggaccaga cccaggacac cgagcttgtg gagaccaggc |
| 841 | cagcaggaga tggaaccttc cagaagtggg cagctgtggt ggtgccttct ggacaagagc |
| 901 | agagatacac gtgccatatg cagcacgagg ggctgcaaga gcccctcacc ctgagctggg |
| 961 | agccatcttc ccagcccacc atccccatca tgggcatcgt tgctggcctg gctgtcctgg |
| 1021 | ttgtcctagc tgtccttgga gctgtggtca ccgctatgat gtgtaggagg aagagctcag |
| 1081 | gtggaaaagg agggagctgc tctcaggctg cgtgcagcaa cagtgcccag ggctctgatg |
| 1141 | agtctctcat cacttgtaaa gcctgagaca gctgcctgtg tgggactgag atgcaggatt |
| 1201 | tcttcacacc tctcctttgt gacttcaaga gcctctggca tctctttctg caaaggcacc |
| 1261 | tgaatgtgtc tgcgttcctg ttagcataat gtgaggaggt ggagagacag cccacccccg |
| 1321 | tgtccaccgt gacccctgtc cccacactga cctgtgttcc ctccccgatc atctttcctg |
| 1381 | ttccagagag gtggggctgg atgtctccat ctctgtctca aattcatggt gcactgagct |
| 1441 | gcaacttctt acttccctaa tgaagttaag aacctgaata taaatttgtg ttctcaaata |
| 1501 | tttgctatga agcgttgatg gattaattaa ataagtcaat tcctagaagt tgagagagca |
| 1561 | aataaagacc tgagaacctt ccagaa. |

[0342] Compositions of the disclosure may comprise a gRNA comprising a spacer sequence that specifically binds to a target sequence of an RNA molecule encoding an α-chain derived from an HLA-C gene comprising or consisting of 20 nucleotides of the sequence of

| (SEQ ID NO: 219) | |
|---|---|
| 1 | tccgcagtcc cggttctaaa gtccccagtc acccacccgg actcacattc tccccagagg |
| 61 | ccgagatgcg ggtcatggcg ccccgagccc tcctcctgct gctctcggga ggcctggccc |
| 121 | tgaccgagac ctgggcctgc tcccactcca tgaggtattt cgacaccgcc gtgtcccggc |
| 181 | ccggccgcgg agagccccgc ttcatctcag tgggctacgt ggacgacacg cagttcgtgc |
| 241 | ggttcgacag cgacgccgcg agtccgagag gggagccgcg ggcgccgtgg gtggagcagg |
| 301 | aggggccgga gtattgggac cgggagacac agaactacaa gcgccaggca caggctgacc |
| 361 | gagtgagcct gcggaacctg cgcggctact acaaccagag cgaggacggg tctcacaccc |
| 421 | tccagaggat gtatggctgc gacctggggc ccgacgggcg cctcctccgc gggtatgacc |
| 481 | agtccgccta cgacggcaag gattacatcg ccctgaacga ggacctgcgc tcctggaccg |
| 541 | ccgcggacac cgcggctcag atcacccagc gcaagttgga ggcggcccgt gcggcggagc |
| 601 | agctgagagc ctacctggag ggcacgtgcg tggagtggct ccgcagatac ctggagaacg |
| 661 | ggaaggagac gctgcagcgc gcagaacccc caaagacaca cgtgacccac caccccctct |
| 721 | ctgaccatga ggccaccctg aggtgctggg ccctgggctt ctaccctgcg gagatcacac |
| 781 | tgacctggca gcgggatggg gaggaccaga cccaggacac cgagcttgtg gagaccaggc |
| 841 | cagcaggaga tggaaccttc cagaagtggg cagctgtggt ggtgccttct ggacaagagc |
| 901 | agagatacac gtgccatatg cagcacgagg ggctgcaaga gcccctcacc ctgagctggg |
| 961 | agccatcttc ccagcccacc atccccatca tgggcatcgt tgctggcctg gctgtcctgg |
| 1021 | ttgtcctagc tgtccttgga gctgtggtca ccgctatgat gtgtaggagg aagagctcag |
| 1081 | gtggaaaagg agggagctgc tctcaggctg cgtgcagcaa cagtgcccag ggctctgatg |
| 1141 | agtctctcat cacttgtaaa gcctgagaca gctgcctgtg tgggactgag atgcaggatt |
| 1201 | tcttcacacc tctcctttgt gacttcaaga gcctctggca tctctttctg caaaggcgtc |
| 1261 | tgaatgtgtc tgcgttcctg ttagcataat gtgaggaggt ggagagacag cccacccccg |
| 1321 | tgtccaccgt gacccctgtc cccacactga cctgtgttcc ctccccgatc atctttcctg |
| 1381 | ttccagagag gtggggctgg atgtctccat ctctgtctca aattcatggt gcactgagct |
| 1441 | gcaacttctt acttccctaa tgaagttaag aacctgaata taaatttgtg ttctcaaata |
| 1501 | tttgctatga agcgttgatg gattaattaa ataagtcaat tcctagaagt tgagagagca |
| 1561 | aataaagacc tgagaacctt ccagaa. |

[0343] Compositions of the disclosure may comprise a gRNA comprising a spacer sequence that specifically binds to a target sequence of an RNA molecule encoding an β2M protein comprising or consisting of 20 nucleotides of the sequence of

| (SEQ ID NO: 220) | |
|---|---|
| 1 | attcctgaag ctgacagcat tcgggccgag atgtctcgct ccgtggcctt agctgtgctc |
| 61 | gcgctactct ctctttctgg cctggaggct atccagcgta ctccaaagat tcaggtttac |
| 121 | tcacgtcatc cagcagagaa tggaaagtca aatttcctga attgctatgt gtctgggttt |
| 181 | catccatccg acattgaagt tgacttactg aagaatggag agagaattga aaaagtggag |
| 241 | cattcagact tgtctttcag caaggactgg tctttctatc tcttgtacta cactgaattc |
| 301 | acccccactg aaaaagatga gtatgcctgc cgtgtgaacc atgtgacttt gtcacagccc |
| 361 | aagatagtta agtgggatcg agacatgtaa gcagcatcat ggaggtttga agatgccgca |
| 421 | tttggattgg atgaattcca aattctgctt gcttgctttt taatattgat atgcttatac |
| 481 | acttacactt tatgcacaaa atgtagggtt ataataatgt taacatggac atgatcttct |
| 541 | ttataattct actttgagtg ctgtctccat gtttgatgta tctgagcagg ttgctccaca |
| 601 | ggtagctcta ggagggctgg caacttagag gtggggagca gagaattctc ttatccaaca |
| 661 | tcaacatctt ggtcagattt gaactcttca atctcttgca ctcaaagctt gttaagatag |
| 721 | ttaagcgtgc ataagttaac ttccaattta catactctgc ttagaatttg ggggaaaatt |
| 781 | tagaaatata attgacagga ttattggaaa tttgttataa tgaatgaaac attttgtcat |
| 841 | ataagattca tatttacttc ttatacattt gataaagtaa ggcatggttg tggttaatct |
| 901 | ggtttatttt tgttccacaa gttaaataaa tcataaaact tgatgtgtta tctcttatat |
| 961 | ctcactccca ctattacccc tttattttca aacagggaaa cagtcttcaa gttccacttg |
| 1021 | gtaaaaaatg tgaacccctt gtatatagag tttggctcac agtgtaaagg gcctcagtga |
| 1081 | ttcacatttt ccagattagg aatctgatgc tcaaagaagt taaatggcat agttggggtg |
| 1141 | acacagctgt ctagtgggag gccagccttc tatattttag ccagcgttct ttcctgcggg |
| 1201 | ccaggtcatg aggagtatgc agactctaag agggagcaaa agtatctgaa ggatttaata |
| 1261 | ttttagcaag gaatagatat acaatcatcc cttggtctcc ctgggggatt ggtttcagga |
| 1321 | ccccttcttg gacaccaaat ctatggatat ttaagtccct tctataaaat ggtatagtat |
| 1381 | ttgcatataa cctatccaca tcctcctgta tactttaaat catttctaga ttacttgtaa |
| 1441 | tacctaatac aatgtaaatg ctatgcaaat agttgttatt gtttaaggaa taatgacaag |
| 1501 | aaaaaaaagt ctgtacatgc tcagtaaaga cacaaccatc cctttttttc cccagtgttt |
| 1561 | ttgatccatg gtttgctgaa tccacagatg tggagcccct ggatacggaa ggcccgctgt |
| 1621 | actttgaatg acaaataaca gatttaaaat tttcaaggca tagttttata cctga. |

[0344] Compositions of the disclosure may comprise a gRNA comprising a spacer sequence that specifically binds to a target sequence of an RNA molecule encoding CD28 protein comprising or consisting of 20 nucleotides of the sequence of

| (SEQ ID NO: 221) | |
|---|---|
| 1 | taaagtcatc aaaacaacgt tatatcctgt gtgaaatgct gcagtcagga tgccttgtgg |
| 61 | tttgagtgcc ttgatcatgt gccctaaggg gatggtggcg gtggtggtgg ccgtggatga |
| 121 | cggagactct caggccttgg caggtgcgtc tttcagttcc cctcacactt cgggttcctc |
| 181 | ggggaggagg ggctggaacc ctagcccatc gtcaggacaa agatgctcag gctgctcttg |
| 241 | gctctcaact tattcccttc aattcaagta acaggaaaca agattttggt gaagcagtcg |
| 301 | cccatgcttg tagcgtacga caatgcggtc aaccttagct gcaagtattc ctacaatctc |
| 361 | ttctcaaggg agttccgggc atcccttcac aaaggactgg atagtgctgt ggaagtctgt |
| 421 | gttgtatatg ggaattactc ccagcagctt caggtttact caaaaacggg gttcaactgt |
| 481 | gatgggaaat tgggcaatga atcagtgaca ttctacctcc agaatttgta tgttaaccaa |
| 541 | acagatattt acttctgcaa aattgaagtt atgtatcctc ctccttacct agacaatgag |
| 601 | aagagcaatg gaaccattat ccatgtgaaa gggaaacacc tttgtccaag tcccctattt |
| 661 | cccggacctt ctaagccctt ttgggtgctg gtggtggttg gtggagtcct ggcttgctat |
| 721 | agcttgctag taacagtggc ctttattatt ttctgggtga ggagtaagag gagcaggctc |
| 781 | ctgcacagtg actacatgaa catgactccc cgccgccccg ggcccacccg caagcattac |
| 841 | cagccctatg ccccaccacg cgacttcgca gcctatcgct cctgacacgg acgcctatcc |
| 901 | agaagccagc cggctggcag cccccatctg ctcaatatca ctgctctgga taggaaatga |
| 961 | ccgccatctc cagccggcca cctcaggccc ctgttgggcc accaatgcca atttttctcg |
| 1021 | agtgactaga ccaaatatca agatcatttt gagactctga aatgaagtaa aagagatttc |
| 1081 | ctgtgacagg ccaagtctta cagtgccatg gcccacattc caacttacca tgtacttagt |
| 1141 | gacttgactg agaagttagg gtagaaaaca aaaagggagt ggattctggg agcctcttcc |
| 1201 | ctttctcact cacctgcaca tctcagtcaa gcaaagtgtg gtatccacag acattttagt |
| 1261 | tgcagaagaa aggctaggaa atcattcctt ttggttaaat gggtgtttaa tcttttggtt |
| 1321 | agtgggttaa acggggtaag ttagagtagg gggagggata ggaagacata tttaaaaacc |
| 1381 | attaaaacac tgtctcccac tcatgaaatg agccacgtag ttcctattta atgctgtttt |
| 1441 | cctttagttt agaaatacat agacattgtc ttttatgaat tctgatcata tttagtcatt |
| 1501 | ttgaccaaat gagggatttg gtcaaatgag ggattccctc aaagcaatat caggtaaacc |
| 1561 | aagttgcttt cctcactccc tgtcatgaga cttcagtgtt aatgttcaca atatactttc |
| 1621 | gaaagaataa aatagttctc ctacatgaag aaagaatatg tcaggaaata aggtcacttt |
| 1681 | atgtcaaaat tatttgagta ctatgggacc tggcgcagtg gctcatgctt gtaatcccag |
| 1741 | cactttggga ggccgaggtg ggcagatcac ttgagatcag gaccagcctg gtcaagatgg |
| 1801 | tgaaactccg tctgtactaa aaatacaaaa tttagcttgg cctggtggca ggcacctgta |
| 1861 | atcccagctg cccaagaggc tgaggcatga gaatcgcttg aacctggcag gcggaggttg |
| 1921 | cagtgagccg agatagtgcc acagctctcc agcctgggcg acagagtgag actccatctc |
| 1981 | aaacaacaac aacaacaaca acaacaacaa caaaccacaa aattatttga gtactgtgaa |
| 2041 | ggattatttg tctaacagtt cattccaatc agaccaggta ggagctttcc tgtttcatat |
| 2101 | gtttcagggt tgcacagttg gtctctttaa tgtcggtgtg gagatccaaa gtgggttgtg |
| 2161 | gaaagagcgt ccataggaga agtgagaata ctgtgaaaaa gggatgttag cattcattag |
| 2221 | agtatgagga tgagtcccaa gaaggttctt tggaaggagg acgaatagaa tggagtaatg |
| 2281 | aaattcttgc catgtgctga ggagatagcc agcattaggt gacaatcttc cagaagtggt |
| 2341 | caggcagaag gtgccctggt gagagctcct ttacagggac tttatgtggt ttagggctca |
| 2401 | gagctccaaa actctgggct cagctgctcc tgtaccttgg aggtccattc acatgggaaa |
| 2461 | gtattttgga atgtgtcttt tgaagagagc atcagagttc ttaagggact gggtaaggcc |
| 2521 | tgaccctgaa atgaccatgg atatttttct acctacagtt tgagtcaact agaatatgcc |
| 2581 | tggggacctt gaagaatggc ccttcagtgg ccctcaccat ttgttcatgc ttcagttaat |
| 2641 | tcaggtgttg aaggagctta ggttttagag gcacgtagac ttggttcaag tctcgttagt |
| 2701 | agttgaatag cctcaggcaa gtcactgccc acctaagatg atggttcttc aactataaaa |
| 2761 | tggagataat ggttacaaat gtctcttcct atagtataat ctccataagg gcatggccca |
| 2821 | agtctgtctt tgactctgcc tatccctgac atttagtagc atgcccgaca tacaatgtta |
| 2881 | gctattggta ttattgccat atagataaat tatgtataaa aattaaactg ggcaatagcc |
| 2941 | taagaagggg ggaatattgt aacacaaatt taaacccact acgcagggat gaggtgctat |
| 3001 | aatatgagga ccttttaact tccatcattt tcctgtttct tgaaatagtt tatcttgtaa |
| 3061 | tgaaatataa ggcacctccc acttttatgt atagaaagag gtcttttaat ttttttttaa |
| 3121 | tgtgagaagg aagggaggag taggaatctt gagattccag atcgaaaata ctgtactttg |
| 3181 | gttgattttt aagtgggctt ccattccatg gatttaatca gtcccaagaa gatcaaactc |
| 3241 | agcagtactt gggtgctgaa gaactgttgg atttaccctg gcacgtgtgc cacttgccag |
| 3301 | cttcttgggc acacagagtt cttcaatcca agttatcaga ttgtatttga aaatgacaga |
| 3361 | gctggagagt tttttgaaat ggcagtggca aataaataaa tacttttttt taaatggaaa |
| 3421 | gacttgatct atggtaataa atgattttgt tttctgactg gaaaaatagg cctactaaag |
| 3481 | atgaatcaca cttgagatgt ttcttactca ctctgcacag aaacaaagaa gaaatgttat |
| 3541 | acagggaagt ccgttttcac tattagtatg aaccaagaaa tggttcaaaa acagtggtag |
| 3601 | gagcaatgct ttcatagttt cagatatggt agttatgaag aaaacaatgt catttgctgc |
| 3661 | tattattgta agagtcttat aattaatggt actcctataa tttttgattg tgagctcacc |
| 3721 | tatttgggtt aagcatgcca atttaaagag accaagtgta tgtacattat gttctacata |
| 3781 | ttcagtgata aaattactaa actactatat gtctgcttta aatttgtact ttaatattgt |
| 3841 | cttttggtat taagaaagat atgctttcag aatagatatg cttcgctttg gcaaggaatt |
| 3901 | tggatagaac ttgctattta aaagaggtgt ggggtaaatc cttgtataaa tctccagttt |
| 3961 | agcctttttt gaaaaagcta gactttcaaa tactaatttc acttcaagca gggtacgttt |
| 4021 | ctggtttgtt tgcttgactt cagtcacaat ttcttatcag accaatggct gacctctttg |
| 4081 | agatgtcagg ctaggcttac ctatgtgttc tgtgtcatgt gaatgctgag aagtttgaca |
| 4141 | gagatccaac ttcagccttg accccatcag tccctcgggt taactaactg agccaccggt |
| 4201 | cctcatggct attttaatga gggtattgat ggttaaatgc atgtctgatc ccttatccca |
| 4261 | gccatttgca ctgccagctg ggaactatac cagacctgga tactgatccc aaagtgttaa |
| 4321 | attcaactac atgctggaga ttagagatgg tgccaataaa ggacccagaa ccaggatctt |
| 4381 | gattgctata gacttattaa taatccaggt caaagagagt gacacacact ctctcaagac |
| 4441 | ctggggtgag ggagtctgtg ttatctgcaa ggccatttga ggctcagaaa gtctctcttt |
| 4501 | cctatagata tatgcatact ttctgacata taggaatgta tcaggaatac tcaaccatca |
| 4561 | caggcatgtt cctacctcag ggcctttaca tgtcctgttt actctgtcta gaatgtcctt |
| 4621 | ctgtagatga cctggcttgc ctcgtcaccc ttcaggtcct tgctcaagtg tcatcttctc |
| 4681 | ccctagttaa actaccccac accctgtctg ctttccttgc ttatttttct ccatagcatt |
| 4741 | ttaccatctc ttacattaga catttttctt atttatttgt agtttataag cttcatgagg |
| 4801 | caagtaactt tgctttgttt cttgctgtat ctccagtgcc cagagcagtg cctggtatat |
| 4861 | aataaatatt tattgactga gtgaaaaaaa aaaaaaaaaa. |

[0345] Compositions of the disclosure may comprise a gRNA comprising a spacer sequence that specifically binds to a target sequence of an RNA molecule encoding CD28 protein comprising or consisting of 20 nucleotides of the sequence of

| (SEQ ID NO: 222) | |
|---|---|
| 1 | taaagtcatc aaaacaacgt tatatcctgt gtgaaatgct gcagtcagga tgccttgtgg |
| 61 | tttgagtgcc ttgatcatgt gccctaaggg gatggtggcg gtggtggtgg ccgtggatga |
| 121 | cggagactct caggccttgg caggtgcgtc tttcagttcc cctcacactt cgggttcctc |
| 181 | ggggaggagg ggctggaacc ctagcccatc gtcaggacaa agatgctcag gctgctcttg |
| 241 | gctctcaact tattcccttc aattcaagta acaggaaaca agattttggt gaagcagtcg |
| 301 | cccatgcttg tagcgtacga caatgcggtc aaccttagct ggaaacacct ttgtccaagt |
| 361 | cccctatttc ccggaccttc taagcccttt tgggtgctgg tggtggttgg tggagtcctg |
| 421 | gcttgctata gcttgctagt aacagtggcc tttattattt tctgggtgag gagtaagagg |
| 481 | agcaggctcc tgcacagtga ctacatgaac atgactcccc gccgccccgg gcccacccgc |
| 541 | aagcattacc agccctatgc cccaccacgc gacttcgcag cctatcgctc ctgacacgga |
| 601 | cgcctatcca gaagccagcc ggctggcagc ccccatctgc tcaatatcac tgctctggat |
| 661 | aggaaatgac cgccatctcc agccggccac ctcaggcccc tgttgggcca ccaatgccaa |
| 721 | tttttctcga gtgactagac caaatatcaa gatcattttg agactctgaa atgaagtaaa |
| 781 | agagatttcc tgtgacaggc caagtcttac agtgccatgg cccacattcc aacttaccat |
| 841 | gtacttagtg acttgactga gaagttaggg tagaaaacaa aaagggagtg gattctggga |
| 901 | gcctcttccc tttctcactc acctgcacat ctcagtcaag caaagtgtgg tatccacaga |
| 961 | cattttagtt gcagaagaaa ggctaggaaa tcattccttt tggttaaatg ggtgtttaat |
| 1021 | cttttggtta gtgggttaaa cggggtaagt tagagtaggg ggagggatag gaagacatat |
| 1081 | ttaaaaacca ttaaaacact gtctcccact catgaaatga gccacgtagt tcctatttaa |
| 1141 | tgctgttttc ctttagttta gaaatacata gacattgtct tttatgaatt ctgatcatat |
| 1201 | ttagtcattt tgaccaaatg agggatttgg tcaaatgagg gattccctca aagcaatatc |
| 1261 | aggtaaacca agttgctttc ctcactccct gtcatgagac ttcagtgtta atgttcacaa |
| 1321 | tatactttcg aaagaataaa atagttctcc tacatgaaga aagaatatgt caggaaataa |
| 1381 | ggtcacttta tgtcaaaatt atttgagtac tatgggacct ggcgcagtgg ctcatgcttg |
| 1441 | taatcccagc actttgggag gccgaggtgg gcagatcact tgagatcagg accagcctgg |
| 1501 | tcaagatggt gaaactccgt ctgtactaaa aatacaaaat ttagcttggc ctggtggcag |
| 1561 | gcacctgtaa tcccagctgc ccaagaggct gaggcatgag aatcgcttga acctggcagg |
| 1621 | cggaggttgc agtgagccga gatagtgcca cagctctcca gcctgggcga cagagtgaga |
| 1681 | ctccatctca aacaacaaca acaacaacaa caacaacaac aaaccacaaa attatttgag |
| 1741 | tactgtgaag gattatttgt ctaacagttc attccaatca gaccaggtag gagctttcct |
| 1801 | gtttcatatg tttcagggtt gcacagttgg tctctttaat gtcggtgtgg agatccaaag |
| 1861 | tgggttgtgg aaagagcgtc cataggagaa gtgagaatac tgtgaaaaag ggatgttagc |
| 1921 | attcattaga gtatgaggat gagtcccaag aaggttcttt ggaaggagga cgaatagaat |
| 1981 | ggagtaatga aattcttgcc atgtgctgag gagatagcca gcattaggtg acaatcttcc |
| 2041 | agaagtggtc aggcagaagg tgccctggtg agagctcctt tacagggact ttatgtggtt |
| 2101 | tagggctcag agctccaaaa ctctgggctc agctgctcct gtaccttgga ggtccattca |
| 2161 | catgggaaag tattttggaa tgtgtctttt gaagagagca tcagagttct taagggactg |
| 2221 | ggtaaggcct gaccctgaaa tgaccatgga tatttttcta cctacagttt gagtcaacta |
| 2281 | gaatatgcct ggggaccttg aagaatggcc cttcagtggc cctcaccatt tgttcatgct |
| 2341 | tcagttaatt caggtgttga aggagcttag gttttagagg cacgtagact tggttcaagt |
| 2401 | ctcgttagta gttgaatagc ctcaggcaag tcactgccca cctaagatga tggttcttca |
| 2461 | actataaaat ggagataatg gttacaaatg tctcttccta tagtataatc tccataaggg |
| 2521 | catggcccaa gtctgtcttt gactctgcct atccctgaca tttagtagca tgcccgacat |
| 2581 | acaatgttag ctattggtat tattgccata tagataaatt atgtataaaa attaaactgg |
| 2641 | gcaatagcct aagaaggggg gaatattgta acacaaattt aaacccacta cgcagggatg |
| 2701 | aggtgctata atatgaggac cttttaactt ccatcatttt cctgtttctt gaaatagttt |
| 2761 | atcttgtaat gaaatataag gcacctccca cttttatgta tagaaagagg tcttttaatt |
| 2821 | tttttttaat gtgagaagga agggaggagt aggaatcttg agattccaga tcgaaaatac |
| 2881 | tgtactttgg ttgattttta agtgggcttc cattccatgg atttaatcag tcccaagaag |
| 2941 | atcaaactca gcagtacttg ggtgctgaag aactgttgga tttaccctgg cacgtgtgcc |
| 3001 | acttgccagc ttcttgggca cacagagttc ttcaatccaa gttatcagat tgtatttgaa |
| 3061 | aatgacagag ctggagagtt ttttgaaatg gcagtggcaa ataaataaat actttttttt |
| 3121 | aaatggaaag acttgatcta tggtaataaa tgattttgtt ttctgactgg aaaaataggc |
| 3181 | ctactaaaga tgaatcacac ttgagatgtt tcttactcac tctgcacaga aacaaagaag |
| 3241 | aaatgttata cagggaagtc cgttttcact attagtatga accaagaaat ggttcaaaaa |
| 3301 | cagtggtagg agcaatgctt tcatagtttc agatatggta gttatgaaga aaacaatgtc |
| 3361 | atttgctgct attattgtaa gagtcttata attaatggta ctcctataat ttttgattgt |
| 3421 | gagctcacct atttgggtta agcatgccaa tttaaagaga ccaagtgtat gtacattatg |
| 3481 | ttctacatat tcagtgataa aattactaaa ctactatatg tctgctttaa atttgtactt |
| 3541 | taatattgtc ttttggtatt aagaaagata tgctttcaga atagatatgc ttcgctttgg |
| 3601 | caaggaattt ggatagaact tgctatttaa aagaggtgtg gggtaaatcc ttgtataaat |
| 3661 | ctccagttta gccttttttg aaaaagctag actttcaaat actaatttca cttcaagcag |
| 3721 | ggtacgtttc tggtttgttt gcttgacttc agtcacaatt tcttatcaga ccaatggctg |
| 3781 | acctctttga gatgtcaggc taggcttacc tatgtgttct gtgtcatgtg aatgctgaga |
| 3841 | agtttgacag agatccaact tcagccttga ccccatcagt ccctcgggtt aactaactga |
| 3901 | gccaccggtc ctcatggcta ttttaatgag ggtattgatg gttaaatgca tgtctgatcc |
| 3961 | cttatcccag ccatttgcac tgccagctgg gaactatacc agacctggat actgatccca |
| 4021 | aagtgttaaa ttcaactaca tgctggagat tagagatggt gccaataaag gacccagaac |
| 4081 | caggatcttg attgctatag acttattaat aatccaggtc aaagagagtg acacacactc |
| 4141 | tctcaagacc tggggtgagg gagtctgtgt tatctgcaag gccatttgag gctcagaaag |
| 4201 | tctctctttc ctatagatat atgcatactt tctgacatat aggaatgtat caggaatact |
| 4261 | caaccatcac aggcatgttc ctacctcagg gcctttacat gtcctgttta ctctgtctag |
| 4321 | aatgtccttc tgtagatgac ctggcttgcc tcgtcaccct tcaggtcctt gctcaagtgt |
| 4381 | catcttctcc cctagttaaa ctaccccaca ccctgtctgc tttccttgct tatttttctc |
| 4441 | catagcattt taccatctct tacattagac atttttctta tttatttgta gtttataagc |
| 4501 | ttcatgaggc aagtaacttt gctttgtttc ttgctgtatc tccagtgccc agagcagtgc |
| 4561 | ctggtatata ataaatattt attgactgag tgaaaaaaaa aaaaaaaaa. |

[0346] Compositions of the disclosure may comprise a gRNA comprising a spacer sequence that specifically binds to a target sequence of an RNA molecule encoding CD28 protein comprising or consisting of 20 nucleotides of the sequence of

| (SEQ ID NO: 223) | |
|---|---|
| 1 | taaagtcatc aaaacaacgt tatatcctgt gtgaaatgct gcagtcagga tgccttgtgg |
| 61 | tttgagtgcc ttgatcatgt gccctaaggg gatggtggcg gtggtggtgg ccgtggatga |
| 121 | cggagactct caggccttgg caggtgcgtc tttcagttcc cctcacactt cgggttcctc |
| 181 | ggggaggagg ggctggaacc ctagcccatc gtcaggacaa agatgctcag gctgctcttg |
| 241 | gctctcaact tattcccttc aattcaagta acagggaaac acctttgtcc aagtccccta |
| 301 | tttcccggac cttctaagcc cttttgggtg ctggtggtgg ttggtggagt cctggcttgc |
| 361 | tatagcttgc tagtaacagt ggcctttatt attttctggg tgaggagtaa gaggagcagg |
| 421 | ctcctgcaca gtgactacat gaacatgact ccccgccgcc ccgggcccac ccgcaagcat |
| 481 | taccagccct atgccccacc acgcgacttc gcagcctatc gctcctgaca cggacgccta |
| 541 | tccagaagcc agccggctgg cagcccccat ctgctcaata tcactgctct ggataggaaa |
| 601 | tgaccgccat ctccagccgg ccacctcagg cccctgttgg gccaccaatg ccaatttttc |
| 661 | tcgagtgact agaccaaata tcaagatcat tttgagactc tgaaatgaag taaaagagat |
| 721 | ttcctgtgac aggccaagtc ttacagtgcc atggcccaca ttccaactta ccatgtactt |
| 781 | agtgacttga ctgagaagtt agggtagaaa acaaaaaggg agtggattct gggagcctct |
| 841 | tccctttctc actcacctgc acatctcagt caagcaaagt gtggtatcca cagacatttt |
| 901 | agttgcagaa gaaaggctag gaaatcattc cttttggtta aatgggtgtt taatcttttg |
| 961 | gttagtgggt taaacggggt aagttagagt agggggaggg ataggaagac atatttaaaa |
| 1021 | accattaaaa cactgtctcc cactcatgaa atgagccacg tagttcctat ttaatgctgt |
| 1081 | tttcctttag tttagaaata catagacatt gtcttttatg aattctgatc atatttagtc |
| 1141 | attttgacca aatgagggat ttggtcaaat gagggattcc ctcaaagcaa tatcaggtaa |
| 1201 | accaagttgc tttcctcact ccctgtcatg agacttcagt gttaatgttc acaatatact |
| 1261 | ttcgaaagaa taaaatagtt ctcctacatg aagaaagaat atgtcaggaa ataaggtcac |
| 1321 | tttatgtcaa aattatttga gtactatggg acctggcgca gtggctcatg cttgtaatcc |
| 1381 | cagcactttg ggaggccgag gtgggcagat cacttgagat caggaccagc ctggtcaaga |
| 1441 | tggtgaaact ccgtctgtac taaaaataca aaatttagct tggcctggtg gcaggcacct |
| 1501 | gtaatcccag ctgcccaaga ggctgaggca tgagaatcgc ttgaacctgg caggcggagg |
| 1561 | ttgcagtgag ccgagatagt gccacagctc tccagcctgg gcgacagagt gagactccat |
| 1621 | ctcaaacaac aacaacaaca acaacaacaa caacaaacca caaaattatt tgagtactgt |
| 1681 | gaaggattat ttgtctaaca gttcattcca atcagaccag gtaggagctt tcctgtttca |
| 1741 | tatgtttcag ggttgcacag ttggtctctt taatgtcggt gtggagatcc aaagtgggtt |
| 1801 | gtggaaagag cgtccatagg agaagtgaga atactgtgaa aaagggatgt tagcattcat |
| 1861 | tagagtatga ggatgagtcc caagaaggtt ctttggaagg aggacgaata gaatggagta |
| 1921 | atgaaattct tgccatgtgc tgaggagata gccagcatta ggtgacaatc ttccagaagt |
| 1981 | ggtcaggcag aaggtgccct ggtgagagct cctttacagg gactttatgt ggtttagggc |
| 2041 | tcagagctcc aaaactctgg gctcagctgc tcctgtacct tggaggtcca ttcacatggg |
| 2101 | aaagtatttt ggaatgtgtc ttttgaagag agcatcagag ttcttaaggg actgggtaag |
| 2161 | gcctgaccct gaaatgacca tggatatttt tctacctaca gtttgagtca actagaatat |
| 2221 | gcctggggac cttgaagaat ggcccttcag tggccctcac catttgttca tgcttcagtt |
| 2281 | aattcaggtg ttgaaggagc ttaggtttta gaggcacgta gacttggttc aagtctcgtt |
| 2341 | agtagttgaa tagcctcagg caagtcactg cccacctaag atgatggttc ttcaactata |
| 2401 | aaatggagat aatggttaca aatgtctctt cctatagtat aatctccata agggcatggc |
| 2461 | ccaagtctgt ctttgactct gcctatccct gacatttagt agcatgcccg acatacaatg |
| 2521 | ttagctattg gtattattgc catatagata aattatgtat aaaaattaaa ctgggcaata |
| 2581 | gcctaagaag gggggaatat tgtaacacaa atttaaaccc actacgcagg gatgaggtgc |
| 2641 | tataatatga ggacctttta acttccatca ttttcctgtt tcttgaaata gtttatcttg |
| 2701 | taatgaaata taaggcacct cccactttta tgtatagaaa gaggtctttt aatttttttt |
| 2761 | taatgtgaga aggaagggag gagtaggaat cttgagattc cagatcgaaa atactgtact |
| 2821 | ttggttgatt tttaagtggg cttccattcc atggatttaa tcagtcccaa gaagatcaaa |
| 2881 | ctcagcagta cttgggtgct gaagaactgt tggatttacc ctggcacgtg tgccacttgc |
| 2941 | cagcttcttg ggcacacaga gttcttcaat ccaagttatc agattgtatt tgaaaatgac |
| 3001 | agagctggag agttttttga aatggcagtg gcaaataaat aaatactttt ttttaaatgg |
| 3061 | aaagacttga tctatggtaa taaatgattt tgttttctga ctggaaaaat aggcctacta |
| 3121 | aagatgaatc acacttgaga tgtttcttac tcactctgca cagaaacaaa gaagaaatgt |
| 3181 | tatacaggga agtccgtttt cactattagt atgaaccaag aaatggttca aaaacagtgg |
| 3241 | taggagcaat gctttcatag tttcagatat ggtagttatg aagaaaacaa tgtcatttgc |
| 3301 | tgctattatt gtaagagtct tataattaat ggtactccta taatttttga ttgtgagctc |
| 3361 | acctatttgg gttaagcatg ccaatttaaa gagaccaagt gtatgtacat tatgttctac |
| 3421 | atattcagtg ataaaattac taaactacta tatgtctgct ttaaatttgt actttaatat |
| 3481 | tgtcttttgg tattaagaaa gatatgcttt cagaatagat atgcttcgct ttggcaagga |
| 3541 | atttggatag aacttgctat ttaaaagagg tgtggggtaa atccttgtat aaatctccag |
| 3601 | tttagccttt tttgaaaaag ctagactttc aaatactaat ttcacttcaa gcagggtacg |
| 3661 | tttctggttt gtttgcttga cttcagtcac aatttcttat cagaccaatg gctgacctct |
| 3721 | ttgagatgtc aggctaggct tacctatgtg ttctgtgtca tgtgaatgct gagaagtttg |
| 3781 | acagagatcc aacttcagcc ttgaccccat cagtccctcg ggttaactaa ctgagccacc |
| 3841 | ggtcctcatg gctattttaa tgagggtatt gatggttaaa tgcatgtctg atcccttatc |
| 3901 | ccagccattt gcactgccag ctgggaacta taccagacct ggatactgat cccaaagtgt |
| 3961 | taaattcaac tacatgctgg agattagaga tggtgccaat aaaggaccca gaaccaggat |
| 4021 | cttgattgct atagacttat taataatcca ggtcaaagag agtgacacac actctctcaa |
| 4081 | gacctggggt gagggagtct gtgttatctg caaggccatt tgaggctcag aaagtctctc |
| 4141 | tttcctatag atatatgcat actttctgac atataggaat gtatcaggaa tactcaacca |
| 4201 | tcacaggcat gttcctacct cagggccttt acatgtcctg tttactctgt ctagaatgtc |
| 4261 | cttctgtaga tgacctggct tgcctcgtca cccttcaggt ccttgctcaa gtgtcatctt |
| 4321 | ctcccctagt taaactaccc cacaccctgt ctgctttcct tgcttatttt tctccatagc |
| 4381 | attttaccat ctcttacatt agacattttt cttatttatt tgtagtttat aagcttcatg |
| 4441 | aggcaagtaa ctttgctttg tttcttgctg tatctccagt gcccagagca gtgcctggta |
| 4501 | tataataaat atttattgac tgagtgaaaa aaaaaaaaaa aaa. |

[0347] Compositions of the disclosure may comprise a gRNA comprising a spacer sequence that specifically binds to a target sequence of an RNA molecule encoding CD80 protein comprising or consisting of 20 nucleotides of the sequence of

| (SEQ ID NO: 224) | |
|---|---|
| 1 | gacaagtact gagtgaactc aaaccctctg taaagtaaca gaagttagaa ggggaaatgt |
| 61 | cgcctctctg aagattaccc aaagaaaaag tgatttgtca ttgctttata gactgtaaga |
| 121 | agagaacatc tcagaagtgg agtcttaccc tgaaatcaaa ggatttaaag aaaaagtgga |
| 181 | atttttcttc agcaagctgt gaaactaaat ccacaacctt tggagaccca ggaacaccct |
| 241 | ccaatctctg tgtgttttgt aaacatcact ggagggtctt ctacgtgagc aattggattg |
| 301 | tcatcagccc tgcctgtttt gcacctggga agtgccctgg tcttacttgg gtccaaattg |
| 361 | ttggctttca cttttgaccc taagcatctg aagccatggg ccacacacgg aggcagggaa |
| 421 | catcaccatc caagtgtcca tacctcaatt tctttcagct cttggtgctg gctggtcttt |
| 481 | ctcacttctg ttcaggtgtt atccacgtga ccaaggaagt gaaagaagtg gcaacgctgt |
| 541 | cctgtggtca caatgtttct gttgaagagc tggcacaaac tcgcatctac tggcaaaagg |
| 601 | agaagaaaat ggtgctgact atgatgtctg gggacatgaa tatatggccc gagtacaaga |
| 661 | accggaccat ctttgatatc actaataacc tctccattgt gatcctggct ctgcgcccat |
| 721 | ctgacgaggg cacatacgag tgtgttgttc tgaagtatga aaaagacgct ttcaagcggg |
| 781 | aacacctggc tgaagtgacg ttatcagtca aagctgactt ccctacacct agtatatctg |
| 841 | actttgaaat tccaacttct aatattagaa ggataatttg ctcaacctct ggaggttttc |
| 901 | cagagcctca cctctcctgg ttggaaaatg gagaagaatt aaatgccatc aacacaacag |
| 961 | tttcccaaga tcctgaaact gagctctatg ctgttagcag caaactggat ttcaatatga |
| 1021 | caaccaacca cagcttcatg tgtctcatca agtatggaca tttaagagtg aatcagacct |
| 1081 | tcaactggaa tacaaccaag caagagcatt ttcctgataa cctgctccca tcctgggcca |
| 1141 | ttaccttaat ctcagtaaat ggaatttttg tgatatgctg cctgacctac tgctttgccc |
| 1201 | caagatgcag agagagaagg aggaatgaga gattgagaag ggaaagtgta cgccctgtat |
| 1261 | aacagtgtcc gcagaagcaa ggggctgaaa agatctgaag gtcccacctc catttgcaat |
| 1321 | tgacctcttc tgggaacttc ctcagatgga caagattacc ccaccttgcc ctttacgtat |
| 1381 | ctgctcttag gtgcttcttc acttcagttg ctttgcagga agtgtctaga ggaatatggt |
| 1441 | gggcacagaa gtagctctgg tgaccttgat caaggtgttt tgaaatgcag aattcttgag |
| 1501 | ttctggaagg gactttagag aataccagtg ttattaatga caaaggcact gaggcccagg |
| 1561 | gaggtgaccc gaattataaa ggccagcgcc agaacccaga tttcctaact ctggtgctct |
| 1621 | ttccctttat cagtttgact gtggcctgtt aactggtata tacatatata tgtcaggcaa |
| 1681 | agtgctgctg gaagtagaat ttgtccaata acaggtcaac ttcagagact atctgatttc |
| 1741 | ctaatgtcag agtagaagat tttatgctgc tgtttacaaa agcccaatgt aatgcatagg |
| 1801 | aagtatggca tgaacatctt taggagacta atggaaatat tattggtgtt tacccagtat |
| 1861 | tccatttttt tcattgtgtt ctctattgct gctctctcac tcccccatga ggtacagcag |
| 1921 | aaaggagaac tatccaaaac taatttcctc tgacatgtaa gacgaatgat ttaggtacgt |
| 1981 | caaagcagta gtcaaggagg aaagggatag tccaaagact taactggttc atattggact |
| 2041 | gataatctct ttaaatggct ttatgctagt ttgacctcat ttgtaaaata tttatgagaa |
| 2101 | agttctcatt taaaatgaga tcgttgttta cagtgtatgt actaagcagt aagctatctt |
| 2161 | caaatgtcta aggtagtaac tttccatagg gcctccttag atccctaaga tggctttttc |
| 2221 | tccttggtat ttctgggtct ttctgacatc agcagagaac tggaaagaca tagccaactg |
| 2281 | ctgttcatgt tactcatgac tcctttctct aaaactgcct tccacaattc actagaccag |
| 2341 | aagtggacgc aacttaagct gggataatca cattatcatc tgaaaatctg gagttgaaca |
| 2401 | gcaaaagaag acaacatttc tcaaatgcac atctcatggc agctaagcca catggctggg |
| 2461 | atttaaagcc tttagagcca gcccatggct ttagctacct cactatgctg cttcacaaac |
| 2521 | cttgctcctg tgtaaaacta tattctcagt gtagggcaga gaggtctaac accaacataa |
| 2581 | ggtactagca gtgtttcccg tattgacagg aatacttaac tcaataattc ttttcttttc |
| 2641 | catttagtaa cagttgtgat gactatgttt ctattctaag taattcctgt attctacagc |
| 2701 | agatactttg tcagcaatac taagggaaga aacaaagttg aaccgtttct ttaataa |

[0348] Exemplary gRNA spacer sequences of the disclosure that specifically bind to a target sequence of an RNA molecule encoding a CD80 protein of the disclosure may comprise or consist of a nucleic acid having a sequence selected from any one of comprising SEQ ID NO: 330 to SEQ ID NO: 3067.

[0349] Compositions of the disclosure may comprise a gRNA comprising a spacer sequence that specifically binds to a target sequence of an RNA molecule encoding CD86 protein comprising or consisting of 20 nucleotides of the sequence of:

| (SEQ ID NO: 226) | |
|---|---|
| 1 | agtcattgcc gaggaaggct tgcacagggt gaaagctttg cttctctgct gctgtaacag |
| 61 | ggactagcac agacacacgg atgagtgggg tcatttccag atattaggtc acagcagaag |
| 121 | cagccaaaat ggatccccag tgcactatgg gactgagtaa cattctcttt gtgatggcct |
| 181 | tcctgctctc tggtgctgct cctctgaaga ttcaagctta tttcaatgag actgcagacc |
| 241 | tgccatgcca atttgcaaac tctcaaaacc aaagcctgag tgagctagta gtattttggc |
| 301 | aggaccagga aaacttggtt ctgaatgagg tatacttagg caaagagaaa tttgacagtg |
| 361 | ttcattccaa gtatatgggc cgcacaagtt ttgattcgga cagttggacc ctgagacttc |
| 421 | acaatcttca gatcaaggac aagggcttgt atcaatgtat catccatcac aaaaagccca |
| 481 | caggaatgat tcgcatccac cagatgaatt ctgaactgtc agtgcttgct aacttcagtc |
| 541 | aacctgaaat agtaccaatt tctaatataa cagaaaatgt gtacataaat ttgacctgct |
| 601 | catctataca cggttaccca gaacctaaga agatgagtgt tttgctaaga accaagaatt |
| 661 | caactatcga gtatgatggt attatgcaga aatctcaaga taatgtcaca gaactgtacg |
| 721 | acgtttccat cagcttgtct gtttcattcc ctgatgttac gagcaatatg accatcttct |
| 781 | gtattctgga aactgacaag acgcggcttt tatcttcacc tttctctata gagcttgagg |
| 841 | accctcagcc tcccccagac cacattcctt ggattacagc tgtacttcca acagttatta |
| 901 | tatgtgtgat ggttttctgt ctaattctat ggaaatggaa gaagaagaag cggcctcgca |
| 961 | actcttataa atgtggaacc aacacaatgg agagggaaga gagtgaacag accaagaaaa |
| 1021 | gagaaaaaat ccatatacct gaaagatctg atgaagccca gcgtgttttt aaaagttcga |
| 1081 | agacatcttc atgcgacaaa agtgatacat gtttttaatt aaagagtaaa gcccatacaa |
| 1141 | gtattcattt tttctaccct ttcctttgta agttcctggg caaccttttt gatttcttcc |
| 1201 | agaaggcaaa aagacattac catgagtaat aagggggctc caggactccc tctaagtgga |
| 1261 | atagcctccc tgtaactcca gctctgctcc gtatgccaag aggagacttt aattctctta |
| 1321 | ctgcttcttt tcacttcaga gcacacttat gggccaagcc cagcttaatg gctcatgacc |
| 1381 | tggaaataaa atttaggacc aatacctcct ccagatcaga ttcttctctt aatttcatag |
| 1441 | attgtgtttt ttttttaaat agacctctca atttctggaa aactgccttt tatctgccca |
| 1501 | gaattctaag ctggtgcccc actgaatttt gtgtacctgt gactaaacaa ctacctcctc |
| 1561 | agtctgggtg ggacttatgt atttatgacc ttatagtgtt aatatcttga aacatagaga |
| 1621 | tctatgtact gtaatagtgt gattactatg ctctagagaa aagtctaccc ctgctaagga |
| 1681 | gttctcatcc ctctgtcagg gtcagtaagg aaaacggtgg cctagggtac aggcaacaat |
| 1741 | gagcagacca acctaaattt ggggaaatta ggagaggcag agatagaacc tggagccact |
| 1801 | tctatctggg ctgttgctaa tattgaggag gcttgcccca cccaacaagc catagtggag |
| 1861 | agaactgaat aaacaggaaa atgccagagc ttgtgaaccc tgtttctctt gaagaactga |
| 1921 | ctagtgagat ggcctgggga agctgtgaaa gaaccaaaag agatcacaat actcaaaaga |
| 1981 | gagagagaga gaaaaaagag agatcttgat ccacagaaat acatgaaatg tctggtctgt |
| 2041 | ccaccccatc aacaagtctt gaaacaagca acagatggat agtctgtcca aatggacata |
| 2101 | agacagacag cagtttccct ggtggtcagg gaggggtttt ggtgataccc aagttattgg |
| 2161 | gatgtcatct tcctggaagc agagctgggg agggagagcc atcaccttga taatgggatg |
| 2221 | aatggaagga ggcttaggac tttccactcc tggctgagag aggaagagct gcaacggaat |
| 2281 | taggaagacc aagacacaga tcacccgggg cttacttagc ctacagatgt cctacgggaa |
| 2341 | cgtgggctgg cccagcatag ggctagcaaa tttgagttgg atgattgttt ttgctcaagg |
| 2401 | caaccagagg aaacttgcat acagagacag atatactggg agaaatgact ttgaaaacct |
| 2461 | ggctctaagg tgggatcact aagggatggg gcagtctctg cccaaacata aagagaactc |
| 2521 | tggggagcct gagccacaaa aatgttcctt tattttatgt aaaccctcaa gggttataga |
| 2581 | ctgccatgct agacaagctt gtccatgtaa tattcccatg tttttaccct gcccctgcct |
| 2641 | tgattagact cctagcacct ggctagtttc taacatgttt tgtgcagcac agtttttaat |
| 2701 | aaatgcttgt tacattcatt taaaaaaaaa aaaaa. |

[0350] Exemplary gRNA spacer sequences of the disclosure that specifically bind to a target sequence of an RNA molecule encoding a CD86 protein of the disclosure may comprise or consist of a nucleic acid having a sequence selected from any one of SEQ ID NO: 3068 to SEQ ID NO: 5783.

[0351] Compositions of the disclosure may comprise a gRNA comprising a spacer sequence that specifically binds to a target sequence of an RNA molecule encoding CD86 protein comprising or consisting of 20 nucleotides of the sequence of

| (SEQ ID NO: 227) | |
|---|---|
| 1 | ccctttctgt atttgagttc taccgtcagt cctggcatta tttctctctc tacaaggagc |
| 61 | cttaggaggt acggggagct cgcaaatact ccttttggtt tattcttacc accttgcttc |
| 121 | tgtgttcctt gggaatgctg ctgtgcttat gcatctggtc tctttttgga gctacagtgg |
| 181 | acaggcattt gtgacagcac tatgggactg agtaacattc tctttgtgat ggccttcctg |
| 241 | ctctctggtg ctgctcctct gaagattcaa gcttatttca atgagactgc agacctgcca |
| 301 | tgccaatttg caaactctca aaaccaaagc ctgagtgagc tagtagtatt ttggcaggac |
| 361 | caggaaaact tggttctgaa tgaggtatac ttaggcaaag agaaatttga cagtgttcat |
| 421 | tccaagtata tgggccgcac aagttttgat tcggacagtt ggaccctgag acttcacaat |
| 481 | cttcagatca aggacaaggg cttgtatcaa tgtatcatcc atcacaaaaa gcccacagga |
| 541 | atgattcgca tccaccagat gaattctgaa ctgtcagtgc ttgctaactt cagtcaacct |
| 601 | gaaatagtac caatttctaa tataacagaa aatgtgtaca taaatttgac ctgctcatct |
| 661 | atacacggtt acccagaacc taagaagatg agtgttttgc taagaaccaa gaattcaact |
| 721 | atcgagtatg atggtattat gcagaaatct caagataatg tcacagaact gtacgacgtt |
| 781 | tccatcagct tgtctgtttc attccctgat gttacgagca atatgaccat cttctgtatt |
| 841 | ctggaaactg acaagacgcg gcttttatct tcacctttct ctatagagct tgaggaccct |
| 901 | cagcctcccc cagaccacat tccttggatt acagctgtac ttccaacagt tattatatgt |
| 961 | gtgatggttt tctgtctaat tctatggaaa tggaagaaga agaagcggcc tcgcaactct |
| 1021 | tataaatgtg gaaccaacac aatggagagg gaagagagtg aacagaccaa gaaaagagaa |
| 1081 | aaaatccata tacctgaaag atctgatgaa gcccagcgtg tttttaaaag ttcgaagaca |
| 1141 | tcttcatgcg acaaaagtga tacatgtttt taattaaaga gtaaagccca tacaagtatt |
| 1201 | cattttttct accctttcct ttgtaagttc ctgggcaacc tttttgattt cttccagaag |
| 1261 | gcaaaaagac attaccatga gtaataaggg ggctccagga ctccctctaa gtggaatagc |
| 1321 | ctccctgtaa ctccagctct gctccgtatg ccaagaggag actttaattc tcttactgct |
| 1381 | tcttttcact tcagagcaca cttatgggcc aagcccagct taatggctca tgacctggaa |
| 1441 | ataaaattta ggaccaatac ctcctccaga tcagattctt ctcttaattt catagattgt |
| 1501 | gttttttttt taaatagacc tctcaatttc tggaaaactg ccttttatct gcccagaatt |
| 1561 | ctaagctggt gccccactga attttgtgta cctgtgacta aacaactacc tcctcagtct |
| 1621 | gggtgggact tatgtattta tgaccttata gtgttaatat cttgaaacat agagatctat |
| 1681 | gtactgtaat agtgtgatta ctatgctcta gagaaaagtc tacccctgct aaggagttct |
| 1741 | catccctctg tcagggtcag taaggaaaac ggtggcctag ggtacaggca acaatgagca |
| 1801 | gaccaaccta aatttgggga aattaggaga ggcagagata gaacctggag ccacttctat |
| 1861 | ctgggctgtt gctaatattg aggaggcttg ccccacccaa caagccatag tggagagaac |
| 1921 | tgaataaaca ggaaaatgcc agagcttgtg aaccctgttt ctcttgaaga actgactagt |
| 1981 | gagatggcct ggggaagctg tgaaagaacc aaaagagatc acaatactca aaagagagag |
| 2041 | agagagaaaa aagagagatc ttgatccaca gaaatacatg aaatgtctgg tctgtccacc |
| 2101 | ccatcaacaa gtcttgaaac aagcaacaga tggatagtct gtccaaatgg acataagaca |
| 2161 | gacagcagtt tccctggtgg tcagggaggg gttttggtga tacccaagtt attgggatgt |
| 2221 | catcttcctg gaagcagagc tggggaggga gagccatcac cttgataatg ggatgaatgg |
| 2281 | aaggaggctt aggactttcc actcctggct gagagaggaa gagctgcaac ggaattagga |
| 2341 | agaccaagac acagatcacc cggggcttac ttagcctaca gatgtcctac gggaacgtgg |
| 2401 | gctggcccag catagggcta gcaaatttga gttggatgat tgtttttgct caaggcaacc |
| 2461 | agaggaaact tgcatacaga gacagatata ctgggagaaa tgactttgaa aacctggctc |
| 2521 | taaggtggga tcactaaggg atggggcagt ctctgcccaa acataaagag aactctgggg |
| 2581 | agcctgagcc acaaaaatgt tcctttattt tatgtaaacc ctcaagggtt atagactgcc |
| 2641 | atgctagaca agcttgtcca tgtaatattc ccatgttttt accctgcccc tgccttgatt |
| 2701 | agactcctag cacctggcta gtttctaaca tgttttgtgc agcacagttt ttaataaatg |
| 2761 | cttgttacat tcatttaaaa aaaaaaaaaa. |

[0352] Compositions of the disclosure may comprise a gRNA comprising a spacer sequence that specifically binds to a target sequence of an RNA molecule encoding CD86 protein comprising or consisting of 20 nucleotides of the sequence of

| (SEQ ID NO: 228) | |
|---|---|
| 1 | ccctttctgt atttgagttc taccgtcagt cctggcatta tttctctctc tacaaggagc |
| 61 | cttaggaggt acggggagct cgcaaatact ccttttggtt tattcttacc accttgcttc |
| 121 | tgtgttcctt gggaatgctg ctgtgcttat gcatctggtc tctttttgga gctacagtgg |
| 181 | acaggcattt gtgacagcac tatgggactg agtaacattc tctttgtgat ggccttcctg |
| 241 | ctctctggtg ctgctcctct gaagattcaa gcttatttca atgagactgc agacctgcca |
| 301 | tgccaatttg caaactctca aaaccaaagc ctgagtgagc tagtagtatt ttggcaggac |
| 361 | caggaaaact tggttctgaa tgaggtatac ttaggcaaag agaaatttga cagtgttcat |
| 421 | tccaagtata tgggccgcac aagttttgat tcggacagtt ggaccctgag acttcacaat |
| 481 | cttcagatca aggacaaggg cttgtatcaa tgtatcatcc atcacaaaaa gcccacagga |
| 541 | atgattcgca tccaccagat gaattctgaa ctgtcagtgc ttgctaactt cagtcaacct |
| 601 | gaaatagtac caatttctaa tataacagaa aatgtgtaca taaatttgac ctgctcatct |
| 661 | atacacggtt acccagaacc taagaagatg agtgttttgc taagaaccaa gaattcaact |
| 721 | atcgagtatg atggtattat gcagaaatct caagataatg tcacagaact gtacgacgtt |
| 781 | tccatcagct tgtctgtttc attccctgat gttacgagca atatgaccat cttctgtatt |
| 841 | ctggaaactg acaagacgcg gcttttatct tcacctttct ctataggaac caacacaatg |
| 901 | gagagggaag agagtgaaca gaccaagaaa agagaaaaaa tccatatacc tgaaagatct |
| 961 | gatgaagccc agcgtgtttt taaaagttcg aagacatctt catgcgacaa aagtgataca |
| 1021 | tgtttttaat taaagagtaa agcccataca agtattcatt ttttctaccc tttcctttgt |
| 1081 | aagttcctgg gcaacctttt tgatttcttc cagaaggcaa aaagacatta ccatgagtaa |
| 1141 | taagggggct ccaggactcc ctctaagtgg aatagcctcc ctgtaactcc agctctgctc |
| 1201 | cgtatgccaa gaggagactt taattctctt actgcttctt ttcacttcag agcacactta |
| 1261 | tgggccaagc ccagcttaat ggctcatgac ctggaaataa aatttaggac caatacctcc |
| 1321 | tccagatcag attcttctct taatttcata gattgtgttt tttttttaaa tagacctctc |
| 1381 | aatttctgga aaactgcctt ttatctgccc agaattctaa gctggtgccc cactgaattt |
| 1441 | tgtgtacctg tgactaaaca actacctcct cagtctgggt gggacttatg tatttatgac |
| 1501 | cttatagtgt taatatcttg aaacatagag atctatgtac tgtaatagtg tgattactat |
| 1561 | gctctagaga aaagtctacc cctgctaagg agttctcatc cctctgtcag ggtcagtaag |
| 1621 | gaaaacggtg gcctagggta caggcaacaa tgagcagacc aacctaaatt tggggaaatt |
| 1681 | aggagaggca gagatagaac ctggagccac ttctatctgg gctgttgcta atattgagga |
| 1741 | ggcttgcccc acccaacaag ccatagtgga gagaactgaa taaacaggaa aatgccagag |
| 1801 | cttgtgaacc ctgtttctct tgaagaactg actagtgaga tggcctgggg aagctgtgaa |
| 1861 | agaaccaaaa gagatcacaa tactcaaaag agagagagag agaaaaaaga gagatcttga |
| 1921 | tccacagaaa tacatgaaat gtctggtctg tccaccccat caacaagtct tgaaacaagc |
| 1981 | aacagatgga tagtctgtcc aaatggacat aagacagaca gcagtttccc tggtggtcag |
| 2041 | ggaggggttt tggtgatacc caagttattg ggatgtcatc ttcctggaag cagagctggg |
| 2101 | gagggagagc catcaccttg ataatgggat gaatggaagg aggcttagga ctttccactc |
| 2161 | ctggctgaga gaggaagagc tgcaacggaa ttaggaagac caagacacag atcacccggg |
| 2221 | gcttacttag cctacagatg tcctacggga acgtgggctg gcccagcata gggctagcaa |
| 2281 | atttgagttg gatgattgtt tttgctcaag gcaaccagag gaaacttgca tacagagaca |
| 2341 | gatatactgg gagaaatgac tttgaaaacc tggctctaag gtgggatcac taagggatgg |
| 2401 | ggcagtctct gcccaaacat aaagagaact ctggggagcc tgagccacaa aaatgttcct |
| 2461 | ttattttatg taaaccctca agggttatag actgccatgc tagacaagct tgtccatgta |
| 2521 | atattcccat gtttttaccc tgcccctgcc ttgattagac tcctagcacc tggctagttt |
| 2581 | ctaacatgtt ttgtgcagca cagtttttaa taaatgcttg ttacattcat ttaaaaaaaa |
| 2641 | aaaaaa. |

[0353] Compositions of the disclosure may comprise a gRNA comprising a spacer sequence that specifically binds to a target sequence of an RNA molecule encoding CD86 protein comprising or consisting of 20 nucleotides of the sequence of

| (SEQ ID NO: 229) | |
|---|---|
| 1 | agtcattgcc gaggaaggct tgcacagggt gaaagctttg cttctctgct gctgtaacag |
| 61 | ggactagcac agacacacgg atgagtgggg tcatttccag atattaggtc acagcagaag |
| 121 | cagccaaaat ggatccccag tgcactatgg gactgagtaa cattctcttt gtgatggcct |
| 181 | tcctgctctc tgctaacttc agtcaacctg aaatagtacc aatttctaat ataacagaaa |
| 241 | atgtgtacat aaatttgacc tgctcatcta tacacggtta cccagaacct aagaagatga |
| 301 | gtgttttgct aagaaccaag aattcaacta tcgagtatga tggtattatg cagaaatctc |
| 361 | aagataatgt cacagaactg tacgacgttt ccatcagctt gtctgtttca ttccctgatg |
| 421 | ttacgagcaa tatgaccatc ttctgtattc tggaaactga caagacgcgg cttttatctt |
| 481 | cacctttctc tatagagctt gaggaccctc agcctccccc agaccacatt ccttggatta |
| 541 | cagctgtact tccaacagtt attatatgtg tgatggtttt ctgtctaatt ctatggaaat |
| 601 | ggaagaagaa gaagcggcct cgcaactctt ataaatgtgg aaccaacaca atggagaggg |
| 661 | aagagagtga acagaccaag aaaagagaaa aaatccatat acctgaaaga tctgatgaag |
| 721 | cccagcgtgt ttttaaaagt tcgaagacat cttcatgcga caaaagtgat acatgttttt |
| 781 | aattaaagag taaagcccat acaagtattc attttttcta ccctttcctt tgtaagttcc |
| 841 | tgggcaacct ttttgatttc ttccagaagg caaaaagaca ttaccatgag taataagggg |
| 901 | gctccaggac tccctctaag tggaatagcc tccctgtaac tccagctctg ctccgtatgc |
| 961 | caagaggaga ctttaattct cttactgctt cttttcactt cagagcacac ttatgggcca |
| 1021 | agcccagctt aatggctcat gacctggaaa taaaatttag gaccaatacc tcctccagat |
| 1081 | cagattcttc tcttaatttc atagattgtg tttttttttt aaatagacct ctcaatttct |
| 1141 | ggaaaactgc cttttatctg cccagaattc taagctggtg ccccactgaa ttttgtgtac |
| 1201 | ctgtgactaa acaactacct cctcagtctg ggtgggactt atgtatttat gaccttatag |
| 1261 | tgttaatatc ttgaaacata gagatctatg tactgtaata gtgtgattac tatgctctag |
| 1321 | agaaaagtct acccctgcta aggagttctc atccctctgt cagggtcagt aaggaaaacg |
| 1381 | gtggcctagg gtacaggcaa caatgagcag accaacctaa atttggggaa attaggagag |
| 1441 | gcagagatag aacctggagc cacttctatc tgggctgttg ctaatattga ggaggcttgc |
| 1501 | cccacccaac aagccatagt ggagagaact gaataaacag gaaaatgcca gagcttgtga |
| 1561 | accctgtttc tcttgaagaa ctgactagtg agatggcctg gggaagctgt gaaagaacca |
| 1621 | aaagagatca caatactcaa aagagagaga gagagaaaaa agagagatct tgatccacag |
| 1681 | aaatacatga aatgtctggt ctgtccaccc catcaacaag tcttgaaaca agcaacagat |
| 1741 | ggatagtctg tccaaatgga cataagacag acagcagttt ccctggtggt cagggagggg |
| 1801 | ttttggtgat acccaagtta ttgggatgtc atcttcctgg aagcagagct ggggagggag |
| 1861 | agccatcacc ttgataatgg gatgaatgga aggaggctta ggactttcca ctcctggctg |
| 1921 | agagaggaag agctgcaacg gaattaggaa gaccaagaca cagatcaccc ggggcttact |
| 1981 | tagcctacag atgtcctacg ggaacgtggg ctggcccagc atagggctag caaatttgag |
| 2041 | ttggatgatt gtttttgctc aaggcaacca gaggaaactt gcatacagag acagatatac |
| 2101 | tgggagaaat gactttgaaa acctggctct aaggtgggat cactaaggga tggggcagtc |
| 2161 | tctgcccaaa cataaagaga actctgggga gcctgagcca caaaaatgtt cctttatttt |
| 2221 | atgtaaaccc tcaagggtta tagactgcca tgctagacaa gcttgtccat gtaatattcc |
| 2281 | catgttttta ccctgcccct gccttgatta gactcctagc acctggctag tttctaacat |
| 2341 | gttttgtgca gcacagtttt taataaatgc ttgttacatt catttaaaaa aaaaaaaaa. |

[0354] Compositions of the disclosure may comprise a gRNA comprising a spacer sequence that specifically binds to a target sequence of an RNA molecule encoding CD86 protein comprising or consisting of 20 nucleotides of the sequence of

| (SEQ ID NO: 230) | |
|---|---|
| 1 | agtcattgcc gaggaaggct tgcacagggt gaaagctttg cttctctgct gctgtaacag |
| 61 | ggactagcac agacacacgg atgagtgggg tcatttccag atattaggtc acagcagaag |
| 121 | cagccaaaat ggatccccag tggtgctgct cctctgaaga ttcaagctta tttcaatgag |
| 181 | actgcagacc tgccatgcca atttgcaaac tctcaaaacc aaagcctgag tgagctagta |
| 241 | gtattttggc aggaccagga aaacttggtt ctgaatgagg tatacttagg caaagagaaa |
| 301 | tttgacagtg ttcattccaa gtatatgggc cgcacaagtt ttgattcgga cagttggacc |
| 361 | ctgagacttc acaatcttca gatcaaggac aagggcttgt atcaatgtat catccatcac |
| 421 | aaaaagccca caggaatgat tcgcatccac cagatgaatt ctgaactgtc agtgcttgct |
| 481 | aacttcagtc aacctgaaat agtaccaatt tctaatataa cagaaaatgt gtacataaat |
| 541 | ttgacctgct catctataca cggttaccca gaacctaaga agatgagtgt tttgctaaga |
| 601 | accaagaatt caactatcga gtatgatggt attatgcaga aatctcaaga taatgtcaca |
| 661 | gaactgtacg acgtttccat cagcttgtct gtttcattcc ctgatgttac gagcaatatg |
| 721 | accatcttct gtattctgga aactgacaag acgcggcttt tatcttcacc tttctctata |
| 781 | gagcttgagg accctcagcc tcccccagac cacattcctt ggattacagc tgtacttcca |
| 841 | acagttatta tatgtgtgat ggttttctgt ctaattctat ggaaatggaa gaagaagaag |
| 901 | cggcctcgca actcttataa atgtggaacc aacacaatgg agagggaaga gagtgaacag |
| 961 | accaagaaaa gagaaaaaat ccatatacct gaaagatctg atgaagccca gcgtgttttt |
| 1021 | aaaagttcga agacatcttc atgcgacaaa agtgatacat gtttttaatt aaagagtaaa |
| 1081 | gcccatacaa gtattcattt tttctaccct ttcctttgta agttcctggg caaccttttt |
| 1141 | gatttcttcc agaaggcaaa aagacattac catgagtaat aagggggctc caggactccc |
| 1201 | tctaagtgga atagcctccc tgtaactcca gctctgctcc gtatgccaag aggagacttt |
| 1261 | aattctctta ctgcttcttt tcacttcaga gcacacttat gggccaagcc cagcttaatg |
| 1321 | gctcatgacc tggaaataaa atttaggacc aatacctcct ccagatcaga ttcttctctt |
| 1381 | aatttcatag attgtgtttt ttttttaaat agacctctca atttctggaa aactgccttt |
| 1441 | tatctgccca gaattctaag ctggtgcccc actgaatttt gtgtacctgt gactaaacaa |
| 1501 | ctacctcctc agtctgggtg ggacttatgt atttatgacc ttatagtgtt aatatcttga |
| 1561 | aacatagaga tctatgtact gtaatagtgt gattactatg ctctagagaa aagtctaccc |
| 1621 | ctgctaagga gttctcatcc ctctgtcagg gtcagtaagg aaaacggtgg cctagggtac |
| 1681 | aggcaacaat gagcagacca acctaaattt ggggaaatta ggagaggcag agatagaacc |
| 1741 | tggagccact tctatctggg ctgttgctaa tattgaggag gcttgcccca cccaacaagc |
| 1801 | catagtggag agaactgaat aaacaggaaa atgccagagc ttgtgaaccc tgtttctctt |
| 1861 | gaagaactga ctagtgagat ggcctgggga agctgtgaaa gaaccaaaag agatcacaat |
| 1921 | actcaaaaga gagagagaga gaaaaaagag agatcttgat ccacagaaat acatgaaatg |
| 1981 | tctggtctgt ccaccccatc aacaagtctt gaaacaagca acagatggat agtctgtcca |
| 2041 | aatggacata agacagacag cagtttccct ggtggtcagg gaggggtttt ggtgataccc |
| 2101 | aagttattgg gatgtcatct tcctggaagc agagctgggg agggagagcc atcaccttga |
| 2161 | taatgggatg aatggaagga ggcttaggac tttccactcc tggctgagag aggaagagct |
| 2221 | gcaacggaat taggaagacc aagacacaga tcacccgggg cttacttagc ctacagatgt |
| 2281 | cctacgggaa cgtgggctgg cccagcatag ggctagcaaa tttgagttgg atgattgttt |
| 2341 | ttgctcaagg caaccagagg aaacttgcat acagagacag atatactggg agaaatgact |
| 2401 | ttgaaaacct ggctctaagg tgggatcact aagggatggg gcagtctctg cccaaacata |
| 2461 | aagagaactc tggggagcct gagccacaaa aatgttcctt tattttatgt aaaccctcaa |
| 2521 | gggttataga ctgccatgct agacaagctt gtccatgtaa tattcccatg tttttaccct |
| 2581 | gcccctgcct tgattagact cctagcacct ggctagtttc taacatgttt tgtgcagcac |
| 2641 | agtttttaat aaatgcttgt tacattcatt taaaaaaaaa aaaaa. |

[0355] Compositions of the disclosure may comprise a gRNA comprising a spacer sequence that specifically binds to a target sequence of an RNA molecule encoding ICOSLG protein comprising or consisting of 20 nucleotides of the sequence of

| (SEQ ID NO: 231) | |
|---|---|
| 1 | AGTTAGAGCC GATCTCCCGC GCCCCGAGGT TGCTCCTCTC CGAGGTCTCC CGCGGCCCAA |
| 61 | GTTCTCCGCG CCCCGAGGTC TCCGCGCCCC GAGGTCTCCG CGGCCCGAGG TCTCCGCCCG |
| 121 | CACCATGCGG CTGGGCAGTC CTGGACTGCT CTTCCTGCTC TTCAGCAGCC TTCGAGCTGA |
| 181 | TACTCAGGAG AAGGAAGTCA GAGCGATGGT AGGCAGCGAC GTGGAGCTCA GCTGCGCTTG |
| 241 | CCCTGAAGGA AGCCGTTTTG ATTTAAATGA TGTTTACGTA TATTGGCAAA CCAGTGAGTC |
| 301 | GAAAACCGTG GTGACCTACC ACATCCCACA GAACAGCTCC TTGGAAAACG TGGACAGCCG |
| 361 | CTACCGGAAC CGAGCCCTGA TGTCACCGGC CGGCATGCTG CGGGGCGACT TCTCCCTGCG |
| 421 | CTTGTTCAAC GTCACCCCCC AGGACGAGCA GAAGTTTCAC TGCCTGGTGT TGAGCCAATC |
| 481 | CCTGGGATTC CAGGAGGTTT TGAGCGTTGA GGTTACACTG CATGTGGCAG CAAACTTCAG |
| 541 | CGTGCCCGTC GTCAGCGCCC CCCACAGCCC CTCCCAGGAT GAGCTCACCT TCACGTGTAC |
| 601 | ATCCATAAAC GGCTACCCCA GGCCCAACGT GTACTGGATC AATAAGACGG ACAACAGCCT |
| 661 | GCTGGACCAG GCTCTGCAGA ATGACACCGT CTTCTTGAAC ATGCGGGGCT TGTATGACGT |
| 721 | GGTCAGCGTG CTGAGGATCG CACGGACCCC CAGCGTGAAC ATTGGCTGCT GCATAGAGAA |
| 781 | CGTGCTTCTG CAGCAGAACC TGACTGTCGG CAGCCAGACA GGAAATGACA TCGGAGAGAG |
| 841 | AGACAAGATC ACAGAGAATC CAGTCAGTAC CGGCGAGAAA AACGCGGCCA CGTGGAGCAT |
| 901 | CCTGGCTGTC CTGTGCCTGC TTGTGGTCGT GGCGGTGGCC ATAGGCTGGG TGTGCAGGGA |
| 961 | CCGATGCCTC CAACACAGCT ATGCAGGTGC CTGGGCTGTG AGTCCGGAGA CAGAGCTCAC |
| 1021 | TGGTGAGTTT GCCGTGGGAA GCAGCAGGTT CTGGGGGGCC CAGGGGAGGC TTGGCTGCCA |
| 1081 | GCTGTCTTTC AGAGTTTCAA AAAACTTTCA AAAGGCAAAA GTCCCTTGCC TTGAACAACT |
| 1141 | GTTGTTCCTG GAGACGCAGC GAAGCCCTCG ATGGTGCGCA TGGCATTTCC TGCAGCCTCC |
| 1201 | CCTTGGCATG GGATGGCATC CTGGTGTGCA CTTTGTCACA CTGCGATGGG ATTTTCCCAA |
| 1261 | CATGCACAGA AGCAGAGAGA CGAGTGCTAG ACCCCCGCGC TCCCCAGTGC CCAGCCCCGA |
| 1321 | CCAGGGTGTC CAGGGCGGGT CCAGGCACCG GCGCCCAGCC CCCATGGGGT GTCCGGAGTG |
| 1381 | GGTCCAGGCA CCGGCGCCCA GCCCCCGTGG GGTGTCCAGG GCGGGTCCAG GCACCGGCGC |
| 1441 | CCAGCCCCTG TGGGGTGTCC GGAGTGGGTC CGGGCACCGC CAGCTTCTCT CTGTGGCAGC |
| 1501 | CACTCCTGCA GCTCTCGTTT GCCCCTCAGT TCCAGGAGCA ACATAGATGT GGATTCCTGT |
| 1561 | CCAATTTGGG AAAAATGTCC ACACACGGTC ACCCACCTGG CAGGTGCCTC TGGCTGCAAG |
| 1621 | GGGCGCTGGG CTTCGCAGGC AGGCCAGCCG GGCTCCCCGC CATGGGCCAG GATCCCCTCC |
| 1681 | GAGCCCTGTT TGCCGCCCAG GAGAAGGGGT TCCCCGGGGA CAGTGGGCTC AGGGTGTGCG |
| 1741 | CAGCCACCAT GCTGTGGTGT CACCTGTGGA CCCAGGCGAG CTGATGGCCG ACCGCAGAAA |
| 1801 | CGCACTTCCA AGGCCAGGTC GGCCCATCCA GATGATGCAG GAACACAGCT TGCTAAAAAC |
| 1861 | ACGGCCGGCC TGTTCCCGTC GGAGCCAGTC GAAGTTCCCT GAACAGGCCG CTGTTTCCGA |
| 1921 | AGCTTTAAAC CCTGTGTTTC CACCAAGCTG AGTCCTGAGA AAACCGACGT CTGCCTGCAG |
| 1981 | AAGGGAAAGG GGTGCTTCAT GTTCCTCTCT CTCCTTCATC TCCCT. |

[0356] Exemplary gRNA spacer sequences of the disclosure that specifically bind to a target sequence of an RNA molecule encoding a IOSLG protein of the disclosure may comprise or consist of a nucleic acid having a sequence selected from any one of any one of SEQ ID NO: 5784 to SEQ ID NO: 7789.

[0357] Compositions of the disclosure may comprise a gRNA comprising a spacer sequence that specifically binds to a target sequence of an RNA molecule encoding OX40L protein comprising or consisting of 20 nucleotides of the sequence of

| (SEQ ID NO: 232) | |
|---|---|
| 1 | GGCCCTGGGA CCTTTGCCTA TTTTCTGATT GATAGGCTTT GTTTTGTCTT TACCTCCTTC |
| 61 | TTTCTGGGGA AAACTTCAGT TTTATCGCAC GTTCCCCTTT TCCATATCTT CATCTTCCCT |
| 121 | CTACCCAGAT TGTGAAGATG GAAAGGGTCC AACCCCTGGA AGAGAATGTG GGAAATGCAG |
| 181 | CCAGGCCAAG ATTCGAGAGG AACAAGCTAT TGCTGGTGGC CTCTGTAATT CAGGGACTGG |
| 241 | GGCTGCTCCT GTGCTTCACC TACATCTGCC TGCACTTCTC TGCTCTTCAG GTATCACATC |
| 301 | GGTATCCTCG AATTCAAAGT ATCAAAGTAC AATTTACCGA ATATAAGAAG GAGAAAGGTT |
| 361 | TCATCCTCAC TTCCCAAAAG GAGGATGAAA TCATGAAGGT GCAGAACAAC TCAGTCATCA |
| 421 | TCAACTGTGA TGGGTTTTAT CTCATCTCCC TGAAGGGCTA CTTCTCCCAG GAAGTCAACA |
| 481 | TTAGCCTTCA TTACCAGAAG GATGAGGAGC CCCTCTTCCA ACTGAAGAAG GTCAGGTCTG |
| 541 | TCAACTCCTT GATGGTGGCC TCTCTGACTT ACAAAGACAA AGTCTACTTG AATGTGACCA |
| 601 | CTGACAATAC CTCCCTGGAT GACTTCCATG TGAATGGCGG AGAACTGATT CTTATCCATC |
| 661 | AAAATCCTGG TGAATTCTGT GTCCTTTGAG GGGCTGATGG CAATATCTAA AACCAGGCAC |
| 721 | CAGCATGAAC ACCAAGCTGG GGGTGGACAG GGCATGGATT CTTCATTGCA AGTGAAGGAG |
| 781 | CCTCCCAGCT CAGCCACGTG GGATGTGACA AGAAGCAGAT CCTGGCCCTC CCGCCCCCAC |
| 841 | CCCTCAGGGA TATTTAAAAC TTATTTTATA TACCAGTTAA TCTTATTTAT CCTTATATTT |
| 901 | TCTAAATTGC CTAGCCGTCA CACCCCAAGA TTGCCTTGAG CCTACTAGGC ACCTTTGTGA |
| 961 | GAAAGAAAAA ATAGATGCCT CTTCTTCAAG ATGCATTGTT TCTATTGGTC AGGCAATTGT |
| 1021 | CATAATAAAC TTATGTCATT GAAAACGGTA CCTGACTACC ATTTGCTGGA AATTTGACAT |
| 1081 | GTGTGTGGCA TTATCAAAAT GAAGAGGAGC AAGGAGTGAA GGAGTGGGGT TATGAATCTG |
| 1141 | CCAAAGGTGG TATGAACCAA CCCCTGGAAG CCAAAGCGGC CTCTCCAAGG TTAAATTGAT |
| 1201 | TGCAGTTTGC ATATTGCCTA AATTTAAACT TTCTCATTTG GTGGGGGTTC AAAAGAAGAA |
| 1261 | TCAGCTTGTG AAAAATCAGG ACTTGAAGAG AGCCGTCTAA GAAATACCAC GTGCTTTTTT |
| 1321 | TCTTTACCAT TTTGCTTTCC CAGCCTCCAA ACATAGTTAA TAGAAATTTC CCTTCAAAGA |
| 1381 | ACTGTCTGGG GATGTGATGC TTTGAAAAAT CTAATCAGTG ACTTAAGAGA GATTTTCTTG |
| 1441 | TATACAGGGA GAGTGAGATA ACTTATTGTG AAGGGTTAGC TTTACTGTAC AGGATAGCAG |
| 1501 | GGAACTGGAC ATCTCAGGGT AAAAGTCAGT ACGGATTTTA ATAGCCTGGG GAGGAAAACA |
| 1561 | CATTCTTTGC CACAGACAGG CAAAGCAACA CATGCTCATC CTCCTGCCTA TGCTGAGATA |
| 1621 | CGCACTCAGC TCCATGTCTT GTACACACAG AAACATTGCT GGTTTCAAGA AATGAGGTGA |
| 1681 | TCCTATTATC AAATTCAATC TGATGTCAAA TAGCACTAAG AAGTTATTGT GCCTTATGAA |
| 1741 | AAATAATGAT CTCTGTCTAG AAATACCATA GACCATATAT AGTCTCACAT TGATAATTGA |
| 1801 | AACTAGAAGG GTCTATAATC AGCCTATGCC AGGGCTTCAA TGGAATAGTA TCCCCTTATG |
| 1861 | TTTAGTTGAA ATGTCCCCTT AACTTGATAT AATGTGTTAT GCTTATGGCG CTGTGGACAA |
| 1921 | TCTGATTTTT CATGTCAACT TTCCAGATGA TTTGTAACTT CTCTGTGCCA AACCTTTTAT |
| 1981 | AAACATAAAT TTTTGAGATA TGTATTTTAA AATTGTAGCA CATGTTTCCC TGACATTTTC |
| 2041 | AATAGAGGAT ACAACATCAC AGAATCTTTC TGGATGATTC TGTGTTATCA AGGAATTGTA |
| 2101 | CTGTGCTACA ATTATCTCTA GAATCTCCAG AAAGGTGGAG GGCTGTTCGC CCTTACACTA |
| 2161 | AATGGTCTCA GTTGGATTTT TTTTTCCTGT TTTCTATTTC CTCTTAAGTA CACCTTCAAC |
| 2221 | TATATTCCCA TCCCTCTATT TTAATCTGTT ATGAAGGAAG GTAAATAAAA ATGCTAAATA |
| 2281 | GAAGAAATTG TAGGTAAGGT AAGAGGAATC AAGTTCTGAG TGGCTGCCAA GGCACTCACA |
| 2341 | GAATCATAAT CATGGCTAAA TATTTATGGA GGGCCTACTG TGGACCAGGC ACTGGGCTAA |
| 2401 | ATACTTACAT TTACAAGAAT CATTCTGAGA CAGATATTCA ATGATATCTG GCTTCACTAC |
| 2461 | TCAGAAGATT GTGTGTGTGT TTGTGTGTGT GTGTGTGTGT GTATTTCACT TTTTGTTATT |
| 2521 | GACCATGTTC TGCAAAATTG CAGTTACTCA GTGAGTGATA TCCGAAAAAG TAAACGTTTA |
| 2581 | TGACTATAGG TAATATTTAA GAAAATGCAT GGTTCATTTT TAAGTTTGGA ATTTTTATCT |
| 2641 | ATATTTCTCA CAGATGTGCA GTGCACATGC AGGCCTAAGT ATATGTTGTG TGTGTTGTTT |
| 2701 | GTCTTTGATG TCATGGTCCC CTCTCTTAGG TGCTCACTCG CTTTGGGTGC ACCTGGCCTG |
| 2761 | CTCTTCCCAT GTTGGCCTCT GCAACCACAC AGGGATATTT CTGCTATGCA CCAGCCTCAC |
| 2821 | TCCACCTTCC TTCCATCAAA AATATGTGTG TGTGTCTCAG TCCCTGTAAG TCATGTCCTT |
| 2881 | CACAGGGAGA ATTAACCCTT CGATATACAT GGCAGAGTTT TGTGGGAAAA GAATTGAATG |
| 2941 | AAAAGTCAGG AGATCAGAAT TTTAAATTTG ACTTAGCCAC TAACTAGCCA TGTAACCTTG |
| 3001 | GGAAAGTCAT TTCCCATTTC TGGGTCTTGC TTTTCTTTCT GTTAAATGAG AGGAATGTTA |
| 3061 | AATATCTAAC AGTTTAGAAT CTTATGCTTA CAGTGTTATC TGTGAATGCA CATATTAAAT |
| 3121 | GTCTATGTTC TTGTTGCTAT GAGTCAAGGA GTGTAACCTT CTCCTTTACT ATGTTGAATG |
| 3181 | TATTTTTTTC TGGACAAGCT TACATCTTCC TCAGCCATCT TTGTGAGTCC TTCAAGAGCA |
| 3241 | GTTATCAATT GTTAGTTAGA TATTTTCTAT TTAGAGAATG CTTAAGGGAT TCCAATCCCG |
| 3301 | ATCCAAATCA TAATTTGTTC TTAAGTATAC TGGGCAGGTC CCCTATTTTA AGTCATAATT |
| 3361 | TTGTATTTAG TGCTTTCCTG GCTCTCAGAG AGTATTAATA TTGATATTAA TAATATAGTT |
| 3421 | AATAGTAATA TTGCTATTTA CATGGAAACA AATAAAAGAT CTCAGAATTC ACTAAAAAAA |
| 3481 | AAAA. |

[0358] Exemplary gRNA spacer sequences of the disclosure that specifically bind to a target sequence of an RNA molecule encoding a OX40L protein of the disclosure may comprise or consist of a nucleic acid having a sequence selected from any one of any one of SEQ ID NO: 7790 to SEQ ID NO: 11254.

[0359] Compositions of the disclosure may comprise a gRNA comprising a spacer sequence that specifically binds to a target sequence of an RNA molecule encoding IL12 protein comprising or consisting of 20 nucleotides of the sequence of

| (SEQ ID NO: 233) | |
|---|---|
| 1 | TTTCGCTTTC ATTTTGGGCC GAGCTGGAGG CGGCGGGGCC GTCCCGGAAC GGCTGCGGCC |
| 61 | GGGCACCCCG GGAGTTAATC CGAAAGCGCC GCAAGCCCCG CGGGCCGGCC GCACCGCACG |
| 121 | TGTCACCGAG AAGCTGATGT AGAGAGAGAC ACAGAAGGAG ACAGAAAGCA AGAGACCAGA |
| 181 | GTCCCGGGAA AGTCCTGCCG CGCCTCGGGA CAATTATAAA AATGTGGCCC CCTGGGTCAG |
| 241 | CCTCCCAGCC ACCGCCCTCA CCTGCCGCGG CCACAGGTCT GCATCCAGCG GCTCGCCCTG |
| 301 | TGTCCCTGCA GTGCCGGCTC AGCATGTGTC CAGCGCGCAG CCTCCTCCTT GTGGCTACCC |
| 361 | TGGTCCTCCT GGACCACCTC AGTTTGGCCA GAAACCTCCC CGTGGCCACT CCAGACCCAG |
| 421 | GAATGTTCCC ATGCCTTCAC CACTCCCAAA ACCTGCTGAG GGCCGTCAGC AACATGCTCC |
| 481 | AGAAGGCCAG ACAAACTCTA GAATTTTACC CTTGCACTTC TGAAGAGATT GATCATGAAG |
| 541 | ATATCACAAA AGATAAAACC AGCACAGTGG AGGCCTGTTT ACCATTGGAA TTAACCAAGA |
| 601 | ATGAGAGTTG CCTAAATTCC AGAGAGACCT CTTTCATAAC TAATGGGAGT TGCCTGGCCT |
| 661 | CCAGAAAGAC CTCTTTTATG ATGGCCCTGT GCCTTAGTAG TATTTATGAA GACTTGAAGA |
| 721 | TGTACCAGGT GGAGTTCAAG ACCATGAATG CAAAGCTTCT GATGGATCCT AAGAGGCAGA |
| 781 | TCTTTCTAGA TCAAAACATG CTGGCAGTTA TTGATGAGCT GATGCAGGCC CTGAATTTCA |
| 841 | ACAGTGAGAC TGTGCCACAA AAATCCTCCC TTGAAGAACC GGATTTTTAT AAAACTAAAA |
| 901 | TCAAGCTCTG CATACTTCTT CATGCTTTCA GAATTCGGGC AGTGACTATT GATAGAGTGA |
| 961 | TGAGCTATCT GAATGCTTCC TAAAAAGCGA GGTCCCTCCA AACCGTTGTC ATTTTTATAA |
| 1021 | AACTTTGAAA TGAGGAAACT TTGATAGGAT GTGGATTAAG AACTAGGGAG GGGGAAAGAA |
| 1081 | GGATGGGACT ATTACATCCA CATGATACCT CTGATCAAGT ATTTTTGACA TTTACTGTGG |
| 1141 | ATAAATTGTT TTTAAGTTTT CATGAATGAA TTGCTAAGAA GGGAAAATAT CCATCCTGAA |
| 1201 | GGTGTTTTTC ATTCACTTTA ATAGAAGGGC AAATATTTAT AAGCTATTTC TGTACCAAAG |
| 1261 | TGTTTGTGGA AACAAACATG TAAGCATAAC TTATTTTAAA ATATTTATTT ATATAACTTG |
| 1321 | GTAATCATGA AAGCATCTGA GCTAACTTAT ATTTATTTAT GTTATATTTA TTAAATTATT |
| 1381 | TATCAAGTGT ATTTGAAAAA TATTTTTAAG TGTTCTAAAA ATAAAAGTAT TGAATTAAAG |
| 1441 | TGAAAAAAAA. |

[0360] Exemplary gRNA spacer sequences of the disclosure that specifically bind to a target sequence of an RNA molecule encoding an IL12 protein of the disclosure may comprise or consist of a nucleic acid having a sequence selected from any one of any one of SEQ ID NO: 11255 to SEQ ID NO: 12685.

[0361] Compositions of the disclosure may comprise a gRNA comprising a spacer sequence that specifically binds to a target sequence of an RNA molecule encoding CCR7 protein comprising or consisting of 20 nucleotides of the sequence of

| (SEQ ID NO: 234) | |
|---|---|
| 1 | CACTTCCTCC CCAGACAGGG GTAGTGCGAG GCCGGGCACA GCCTTCCTGT GTGGTTTTAC |
| 61 | CGCCCAGAGA GCGTCATGGA CCTGGGGAAA CCAATGAAAA GCGTGCTGGT GGTGGCTCTC |
| 121 | CTTGTCATTT TCCAGGTATG CCTGTGTCAA GATGAGGTCA CGGACGATTA CATCGGAGAC |
| 181 | AACACCACAG TGGACTACAC TTTGTTCGAG TCTTTGTGCT CCAAGAAGGA CGTGCGGAAC |
| 241 | TTTAAAGCCT GGTTCCTCCC TATCATGTAC TCCATCATTT GTTTCGTGGG CCTACTGGGC |
| 301 | AATGGGCTGG TCGTGTTGAC CTATATCTAT TTCAAGAGGC TCAAGACCAT GACCGATACC |
| 361 | TACCTGCTCA ACCTGGCGGT GGCAGACATC CTCTTCCTCC TGACCCTTCC CTTCTGGGCC |
| 421 | TACAGCGCGG CCAAGTCCTG GGTCTTCGGT GTCCACTTTT GCAAGCTCAT CTTTGCCATC |
| 481 | TACAAGATGA GCTTCTTCAG TGGCATGCTC CTACTTCTTT GCATCAGCAT TGACCGCTAC |
| 541 | GTGGCCATCG TCCAGGCTGT CTCAGCTCAC CGCCACCGTG CCCGCGTCCT TCTCATCAGC |
| 601 | AAGCTGTCCT GTGTGGGCAT CTGGATACTA GCCACAGTGC TCTCCATCCC AGAGCTCCTG |
| 661 | TACAGTGACC TCCAGAGGAG CAGCAGTGAG CAAGCGATGC GATGCTCTCT CATCACAGAG |
| 721 | CATGTGGAGG CCTTTATCAC CATCCAGGTG GCCCAGATGG TGATCGGCTT TCTGGTCCCC |
| 781 | CTGCTGGCCA TGAGCTTCTG TTACCTTGTC ATCATCCGCA CCCTGCTCCA GGCACGCAAC |
| 841 | TTTGAGCGCA ACAAGGCCAT CAAGGTGATC ATCGCTGTGG TCGTGGTCTT CATAGTCTTC |
| 901 | CAGCTGCCCT ACAATGGGGT GGTCCTGGCC CAGACGGTGG CCAACTTCAA CATCACCAGT |
| 961 | AGCACCTGTG AGCTCAGTAA GCAACTCAAC ATCGCCTACG ACGTCACCTA CAGCCTGGCC |
| 1021 | TGCGTCCGCT GCTGCGTCAA CCCTTTCTTG TACGCCTTCA TCGGCGTCAA GTTCCGCAAC |
| 1081 | GATCTCTTCA AGCTCTTCAA GGACCTGGGC TGCCTCAGCC AGGAGCAGCT CCGGCAGTGG |
| 1141 | TCTTCCTGTC GGCACATCCG GCGCTCCTCC ATGAGTGTGG AGGCCGAGAC CACCACCACC |
| 1201 | TTCTCCCCAT AGGCGACTCT TCTGCCTGGA CTAGAGGGAC CTCTCCCAGG GTCCCTGGGG |
| 1261 | TGGGGATAGG GAGCAGATGC AATGACTCAG GACATCCCCC CGCCAAAAGC TGCTCAGGGA |
| 1321 | AAAGCAGCTC TCCCCTCAGA GTGCAAGCCC CTGCTCCAGA AGATAGCTTC ACCCCAATCC |
| 1381 | CAGCTACCTC AACCAATGCC AAAAAAAGAC AGGGCTGATA AGCTAACACC AGACAGACAA |
| 1441 | CACTGGGAAA CAGAGGCTAT TGTCCCCTAA ACCAAAAACT GAAAGTGAAA GTCCAGAAAC |
| 1501 | TGTTCCCACC TGCTGGAGTG AAGGGGCCAA GGAGGGTGAG TGCAAGGGGC GTGGGAGTGG |
| 1561 | CCTGAAGAGT CCTCTGAATG AACCTTCTGG CCTCCCACAG ACTCAAATGC TCAGACCAGC |
| 1621 | TCTTCCGAAA ACCAGGCCTT ATCTCCAAGA CCAGAGATAG TGGGGAGACT TCTTGGCTTG |
| 1681 | GTGAGGAAAA GCGGACATCA GCTGGTCAAA CAAACTCTCT GAACCCCTCC CTCCATCGTT |
| 1741 | TTCTTCACTG TCCTCCAAGC CAGCGGGAAT GGCAGCTGCC ACGCCGCCCT AAAAGCACAC |
| 1801 | TCATCCCCTC ACTTGCCGCG TCGCCCTCCC AGGCTCTCAA CAGGGGAGAG TGTGGTGTTT |
| 1861 | CCTGCAGGCC AGGCCAGCTG CCTCCGCGTG ATCAAAGCCA CACTCTGGGC TCCAGAGTGG |
| 1921 | GGATGACATG CACTCAGCTC TTGGCTCCAC TGGGATGGGA GGAGAGGACA AGGGAAATGT |
| 1981 | CAGGGGCGGG GAGGGTGACA GTGGCCGCCC AAGGCCCACG AGCTTGTTCT TTGTTCTTTG |
| 2041 | TCACAGGGAC TGAAAACCTC TCCTCATGTT CTGCTTTCGA TTCGTTAAGA GAGCAACATT |
| 2101 | TTACCCACAC ACAGATAAAG TTTTCCCTTG AGGAAACAAC AGCTTTAAAA GAAAAAGAAA |
| 2161 | AAAAAAGTCT TTGGTAAATG GCAAAAAAAA AAAAAAAAAA AAAAAAA. |

[0362] Exemplary gRNA spacer sequences of the disclosure that specifically bind to a target sequence of an RNA molecule encoding a CCR7 protein of the disclosure may comprise or consist of a nucleic acid having a sequence selected from any one of any one of SEQ ID NO: 12686 to SEQ ID NO: 14872.

[0363] Compositions of the disclosure may comprise a gRNA comprising a spacer sequence that specifically binds to a target sequence of an RNA molecule, wherein the spacer sequence and the target sequence are reverse complements of one another. In some embodiments, compositions of the disclosure may comprise a single (i.e., singular) gRNA comprising a) a first spacer sequence that specifically binds to a first target RNA sequence and b) a second spacer sequence that specifically binds to a second target RNA sequence, wherein the first and second spacer sequences each bind different target RNA sequences. In some embodiments, first and second spacer sequences which bind different target RNA sequences are not comprised within a single (i.e., singular) gRNA but rather a first spacer sequence is comprised within a first gRNA and a second spacer sequence is comprised within a second gRNA sequence. In some embodiments, a spacer sequence disclosed herein comprises a portion of a nucleic acid sequence encoding a protein component of the adaptive immune response, wherein the protein component is selected from the group consisting of Beta-2-microglobulin β2M), Human Leukocyte Antigen A (HLA-A), Human Leukocyte Antigen B (HLA-B), Human Leukocyte Antigen C (HLA-C), Cluster of Differentiation 28 (CD28), Cluster of Differentiation 80 (CD80), Cluster of Differentiation 86 (CD86), Inducible T-cell Costimulator (ICOS), ICOS Ligand (ICOSLG), OX40L, Interleukin 12 (IL12), and CC Chemokine Receptor 7 (CCR7). In some embodiments, a spacer which is a portion of a nucleic acid sequence encoding a protein component of an adaptive immune response is about 20 or 21 nucleotides in length.

[0364] All nucleotide sequences of the disclosure may include a uracil (U) or a thymine (T) interchangeably.

[0365] Exemplary, non-limiting Zika NS5 targeting spacer sequences of sgRNAs include, but are not limited to: gcaatgatcttcatgttgggagc (SEQ ID NO: 196), gaaccttgttgatgaactcttc (SEQ ID NO: 197), gttggtgattagagcttcattc (SEQ ID NO: 198), and gagtgatcctcgttcaagaatcc (SEQ ID NO: 199).

[0366] Exemplary, non-limiting lambda NS5 targeting spacer sequences of sgRNAs include, but are not limited to: GTGATAAGTGGAATGCCATG (SEQ ID NO: 200) and

[0367] GUUUAAGAGCUAUGCUGGAAACAGCAUAGCAAG UUUAAAUAAGGCUAGUCCGUUAUCAACUUGAAAAAGUGGCACCGAGUCGGUGCU

[0368] (SEQ ID NO: 201).

### Methods of Simultaneous Treatment of Disease and Prevention of Immune Response

[0369] The disclosure provides compositons and methods for the simultaneous treatment of a disease or disorder in a subject by delivering a gene therapy to a cell and prevention of an immune response to the cell receiving the gene therapy. For example, the composition shown in FIG. 4 may be administered to a subject wherein gRNA 1 binds to a target sequence within an RNA molecule that encodes a component of an adapative immune response and gRNA2 binds to a target sequence within an RNA molecule associated with a disease or disorder. By targeting an RNA molecule that encodes a component of an adapative immune response gRNA1 prevents the display of an antigen associated with the composition or a vector comprising the composition on the surface of the cell, thereby masking the cell from the subject's immune system. gRNA2 simultaneously targets a second RNA molecule to treat a disease or disorder of the disclosure.

[0370] In alternative embodiments, gRNA1 and gRNA2 of the composition shown in FIG. 4, for example, can each target a distinct RNA molecule encoding a component of the adaptive immune response. For example, while gRNA1 targets an RNA molecule encoding a β2M polypeptide, gRNA2 targets a costimulatory molecule (ICOSLG, CD80, CD86, OX40L, IL12 or CCR7).

[0371] In some embodients, compositions of the disclosure may comprise or consist of at least 1, 2, 3, 4, 5, 6, 7, 8, 9, or 10 gRNAs.

[0372] In some embodiments, compositions of the disclosure may comprise or consist of at least 1, 2, 3, 4, 5, 6, 7, 8, 9, or 10 gRNAs, the expression of which is under the control of a constitutive promoter (e.g. U6) and a fusion protein comprising a first RNA binding protein and a second RNA binding protein, the expression of which fusion is under the control of a viral promoter, which may be optionally constitutive (e.g. EFS).

[0373] In some embodiments, compositions of the disclosure may comprise or consist of at least 1, 2, 3, 4, 5, 6, 7, 8, 9, or 10 gRNAs, the expression of which is under the control of a first promoter and a fusion protein comprising a first RNA binding protein and a second RNA binding protein, the expression of which fusion is under the control of a second promoter, wherein the first promoter drives stronger expression of at least 1, 2, 3, 4, 5, 6,7, 8, 9, or 10 gRNAs that the second promoter drives expression of the fusion protein. In some embodiments, compositions of the disclosure may comprise or consist of at least 1, 2, 3, 4, 5, 6, 7, 8, 9, or 10 gRNAs, the expression of which is under the control of a first promoter and a fusion protein comprising a first RNA binding protein and a second RNA binding protein, the expression of which fusion is under the control of a second promoter, wherein the first promoter drives weaker expression of at least 1, 2, 3, 4, 5, 6,7, 8, 9, or 10 gRNAs that the second promoter drives expression of the fusion protein. By varying the relative strength of the promoters driving expression of the gRNA versus fusion protein components of the compositions of the disclosure, the compositions may be provided in ratiometric doses while expressing the gRNA and fusion protein form the same vector. Thus, the compositions of the disclosure may comprise gRNAs that bind RNA molecules associated with two or more diseases as well as two or more components of an adaptive immune response. In some embodiments, the compositions of the disclosure may comprise fusion proteins disclosed herein, wherein at least one of the fusion partner proteins is an endonuclease such as, without limitation, RNAse1, RNAse4, RNAse6, RNAse7, RNAse8, RNAse2, RNAse6PL, RNAseL, RNAseT2, RNAse11, RNAseT2-like, NOB1, ENDOV, ENDOG, ENDOD1, hFEN1, hSLFN14, hLACTB2, APEX2, ANG, HRSP12, ZC3H12A, RIDA, PDL6, NTHL, KIAA0391, APEX1, AGO2, EXOG, ZC3H12D, ERN2, PELO, YBEY, CPSF4L, hCG 2002731, ERCC1, RAC1, RAA1, RAB1, DNA2, F1135220, F1113173, ERCC4, RNAse1(K41R), RNAse1(K41R, D121E), RNAse1(K41R, D121E, H119N), RNAse1(H119N), RNAse1(R39D, N67D, N88A, G89D, R91D, H119N), RNAsel(R39D, N67D, N88A, G89D, R91D, H119N, K41R, D121E), RNAsel(R39D, N67D, N88A, G89D, R91D), TENM1, TENM2, RNAseK, TALEN, ZNF638, or PIN of hSMG6.

### Methods of Use

[0374] The disclosure provides a method of modifying level of expression of an RNA molecule of the disclosure or a protein encoded by the RNA molecule comprising contacting the composition and the RNA molecule under conditions suitable for binding of one or more of the guide RNA or the fusion protein (or a portion thereof) to the RNA molecule.

[0375] The disclosure provides a method of modifying an activity of a protein encoded by an RNA molecule comprising contacting the composition and the RNA molecule under conditions suitable for binding of one or more of the guide RNA or the fusion protein (or a portion thereof) to the RNA molecule.

[0376] The disclosure provides a method of modifying level of expression of an RNA molecule of the disclosure or a protein encoded by the RNA molecule comprising contacting the composition and a cell comprising the RNA molecule under conditions suitable for binding of one or more of the guide RNA or the fusion protein (or a portion thereof) to the RNA molecule. In some embodiments, the cell is in vivo, in vitro, ex vivo or in situ. In some embodiments, the composition comprises a vector comprising composition comprising a guide RNA of the disclosure and a fusion protein of the disclosure. In some embodiments, the vector is an AAV.

[0377] The disclosure provides a method of modifying an activity of a protein encoded by an RNA molecule comprising contacting the composition and a cell comprising the RNA molecule under conditions suitable for binding of one or more of the guide RNA or the fusion protein (or a portion thereof) to the RNA molecule. In some embodiments, the cell is in vivo, in vitro, ex vivo or in situ. In some embodiments, the composition comprises a vector comprising composition comprising a guide RNA of the disclosure and a fusion protein of the disclosure. In some embodiments, the vector is an AAV.

[0378] The disclosure provides a method of modifying level of expression of an RNA molecule of the disclosure or a protein encoded by the RNA molecule comprising contacting the composition and the RNA molecule under conditions suitable for RNA nuclease activity wherein the fusion protein induces a break in the RNA molecule.

[0379] The disclosure provides a method of modifying an activity of a protein encoded by an RNA molecule comprising contacting the composition and the RNA molecule under conditions suitable for RNA nuclease activity wherein the fusion protein induces a break in the RNA molecule.

[0380] The disclosure provides a method of modifying a level of expression of an RNA molecule of the disclosure or a protein encoded by the RNA molecule comprising contacting the composition and a cell comprising the RNA molecule under conditions suitable for RNA nuclease activity wherein the fusion protein induces a break in the RNA molecule. In some embodiments, the cell is in vivo, in vitro, ex vivo or in situ. In some embodiments, the composition comprises a vector comprising composition comprising a guide RNA of the disclosure and a fusion protein of the disclosure. In some embodiments, the vector is an AAV.

[0381] The disclosure provides a method of modifying an activity of a protein encoded by an RNA molecule comprising contacting the composition and a cell comprising the RNA molecule under conditions suitable for RNA nuclease activity wherein the fusion protein induces a break in the RNA molecule. In some embodiments, the cell is in vivo, in vitro, ex vivo or in situ. In some embodiments, the composition comprises a vector comprising composition comprising a guide RNA of the disclosure and a fusion protein of the disclosure. In some embodiments, the vector is an AAV.

[0382] The disclosure provides a method of treating a disease or disorder comprising administering to a subject a therapeutically effective amount of a composition of the disclosure.

[0383] The disclosure provides a method of treating a disease or disorder comprising administering to a subject a therapeutically effective amount of a composition of the disclosure, wherein the composition comprises a vector comprising composition comprising a guide RNA of the disclosure and a fusion protein of the disclosure and wherein the composition modifies a level of expression of an RNA molecule of the disclosure or a protein encoded by the RNA molecule.

[0384] The disclosure provides a method of treating a disease or disorder comprising administering to a subject a therapeutically effective amount of a composition of the disclosure, wherein the composition comprises a vector comprising composition comprising a guide RNA of the disclosure and a fusion protein of the disclosure and wherein the composition modifies an activity of a protein encoded by an RNA molecule.

[0385] In some embodiments of the compositions and methods of the disclosure, a disease or disorder of the disclosure includes, but is not limited to, a genetic disease or disorder. In some embodiments, the genetic disease or disorder is a single-gene disease or disorder. In some embodiments, the single-gene disease or disorder is an autosomal dominant disease or disorder, an autosomal recessive disease or disorder, an X-chromosome linked (X-linked) disease or disorder, an X-linked dominant disease or disorder, an X-linked recessive disease or disorder, a Y-linked disease or disorder or a mitochondrial disease or disorder. In some embodiments, the genetic disease or disorder is a multiple-gene disease or disorder. In some embodiments, the genetic disease or disorder is a multiple-gene disease or disorder. In some embodiments, the single-gene disease or disorder is an autosomal dominant disease or disorder including, but not limited to, Huntington's disease, neurofibromatosis type 1, neurofibromatosis type 2, Marfan syndrome, hereditary nonpolyposis colorectal cancer, hereditary multiple exostoses, Von Willebrand disease, and acute intermittent porphyria. In some embodiments, the single-gene disease or disorder is an autosomal recessive disease or disorder including, but not limited to, Albinism, Medium-chain acyl-CoA dehydrogenase deficiency, cystic fibrosis, sickle-cell disease, Tay-Sachs disease, Niemann-Pick disease, spinal muscular atrophy, and Roberts syndrome. In some embodiments, the single-gene disease or disorder is X-linked disease or disorder including, but not limited to, muscular dystrophy, Duchenne muscular dystrophy, Hemophilia, Adrenoleukodystrophy (ALD), Rett syndrome, and Hemophilia A. In some embodiments, the single-gene disease or disorder is a mitochondrial disorder including, but not limited to, Leber's hereditary optic neuropathy.

[0386] In some embodiments of the compositions and methods of the disclosure, a disease or disorder of the disclosure includes, but is not limited to, an immune disease or disorder. In some embodiments, the immune disease or disorder is an immunodeficiency disease or disorder including, but not limited to, B-cell deficiency, T-cell deficiency, neutropenia, asplenia, complement deficiency, acquired immunodeficiency syndrome (AIDS) and immunodeficiency due to medical intervention (immunosuppression as an intended or adverse effect of a medical therapy). In some embodiments, the immune disease or disorder is an autoimmune disease or disorder including, but not limited to, Achalasia, Addison's disease, Adult Still's disease, Agammaglobulinemia, Alopecia areata, Amyloidosis, Anti-GBM/Anti-TBM nephritis, Antiphospholipid syndrome, Autoimmune angioedema, Autoimmune dysautonomia, Autoimmune encephalomyelitis, Autoimmune hepatitis, Autoimmune inner ear disease (AIED), Autoimmune myocarditis, Autoimmune oophoritis, Autoimmune orchitis, Autoimmune pancreatitis, Autoimmune retinopathy, Autoimmune urticaria, Axonal & neuronal neuropathy (AMAN), Baló disease, Behcet's disease, Benign mucosal pemphigoid, Bullous pemphigoid, Castleman disease (CD), Celiac disease, Chagas disease, Chronic inflammatory demyelinating polyneuropathy (CIDP), Chronic recurrent multifocal osteomyelitis (CRMO), Churg-Strauss Syndrome (CSS) or Eosinophilic Granulomatosis (EGPA), Cicatricial pemphigoid, Cogan's syndrome, Cold agglutinin disease, Congenital heart block, Coxsackie myocarditis, CREST syndrome, Crohn's disease, Dermatitis herpetiformis, Dermatomyositis, Devic's disease (neuromyelitis optica), Discoid lupus, Dressler's syndrome, Endometriosis, Eosinophilic esophagitis (EoE), Eosinophilic fasciitis, Erythema nodosum, Essential mixed cryoglobulinemia, Evans syndrome, Fibromyalgia, Fibrosing alveolitis, Giant cell arteritis (temporal arteritis), Giant cell myocarditis, Glomerulonephritis, Goodpasture's syndrome, Granulomatosis with Polyangiitis, Graves' disease, Guillain-Barre syndrome, Hashimoto's thyroiditis, Hemolytic anemia, Henoch-Schonlein purpura (HSP), Herpes gestationis or pemphigoid gestationis (PG), Hidradenitis Suppurativa (HS) (Acne Inversa), Hypogammalglobulinemia, IgA Nephropathy, IgG4-related sclerosing disease, Immune thrombocytopenic purpura (ITP), Inclusion body myositis (IBM), Interstitial cystitis (IC), Juvenile arthritis, Juvenile diabetes (Type 1 diabetes), Juvenile myositis (JM), Kawasaki disease, Lambert-Eaton syndrome, Leukocytoclastic vasculitis, Lichen planus, Lichen sclerosus, Ligneous conjunctivitis, Linear IgA disease (LAD), Lupus, Lyme disease chronic, Meniere's disease, Microscopic polyangiitis (MPA), Mixed connective tissue disease (MCTD), Mooren's ulcer, Mucha-Habermann disease, Multifocal Motor Neuropathy (MMN) or MMNCB, Multiple sclerosis, Myasthenia gravis, Myositis, Narcolepsy, Neonatal Lupus, Neuromyelitis optica, Neutropenia, Ocular cicatricial pemphigoid, Optic neuritis, Palindromic rheumatism (PR), PANDAS, Paraneoplastic cerebellar degeneration (PCD), Paroxysmal nocturnal hemoglobinuria (PNH), Parry Romberg syndrome, Pars planitis (peripheral uveitis), Parsonnage-Turner syndrome, Pemphigus, Peripheral neuropathy, Perivenous encephalomyelitis, Pernicious anemia (PA), POEMS syndrome, Polyarteritis nodosa, Polyglandular syndromes type I, II, III, Polymyalgia rheumatica, Polymyositis, Postmyocardial infarction syndrome, Postpericardiotomy syndrome, Primary biliary cirrhosis, Primary sclerosing cholangitis, Progesterone dermatitis, Psoriasis, Psoriatic arthritis, Pure red cell aplasia (PRCA), Pyoderma gangrenosum, Raynaud's phenomenon, Reactive Arthritis, Reflex sympathetic dystrophy, Relapsing polychondritis, Restless legs syndrome (RLS), Retroperitoneal fibrosis, Rheumatic fever, Rheumatoid arthritis, Sarcoidosis, Schmidt syndrome, Scleritis, Scleroderma, Sjogren's syndrome, Sperm & testicular autoimmunity, Stiff person syndrome (SPS), Subacute bacterial endocarditis (SBE), Susac's syndrome, Sympathetic ophthalmia (SO), Takayasu's arteritis, Temporal arteritis/Giant cell arteritis, Thrombocytopenic purpura (TTP), Tolosa-Hunt syndrome (THS), Transverse myelitis, Type 1 diabetes, Ulcerative colitis (UC), Undifferentiated connective tissue disease (UCTD), Uveitis, Vasculitis, Vitiligo, Vogt-Koyanagi-Harada Disease, or Wegener's granulomatosis.

[0387] In some embodiments of the compositions and methods of the disclosure, a disease or disorder of the disclosure includes, but is not limited to, an inflammatory disease or disorder. In some embodiments, the inflammatory disease or disorder includes, but is not limited to, Alzheimer's disease, ankylosing spondylitis, arthritis, osteoarthritis, rheumatoid arthritis, psoriatic arthritis, asthma, atherosclerosis, Crohn's disease, colitis, dermatitis, diverticulitis, fibromyalgia, hepatitis, irritable bowel syndrome (IBS), systemic lupus erythematous (SLE), nephritis, Parkinson's disease, ulcerative colitis, acute bronchitis, acute appendicitis, tonsillitis, infective meningitis, sinusitis, asthma, chronic peptic ulcer, tuberculosis, rheumatoid arthritis, periodontitis, gout, Scleroderma, vasculitis, and myositis.

[0388] In some embodiments of the compositions and methods of the disclosure, a disease or disorder of the disclosure includes, but is not limited to, a metabolic disease or disorder. In some embodiments of the compositions and methods of the disclosure, a disease or disorder of the disclosure includes, but is not limited to, a degenerative or a progressive disease or disorder. In some embodiments, the degenerative or a progressive disease or disorder includes, but is not limited to, amyotrophic lateral sclerosis (ALS), Huntington's disease, Alzheimer's disease, and aging.

[0389] In some embodiments of the compositions and methods of the disclosure, a disease or disorder of the disclosure includes, but is not limited to, an infectious disease or disorder.

[0390] In some embodiments of the compositions and methods of the disclosure, a disease or disorder of the disclosure includes, but is not limited to, a pediatric or a developmental disease or disorder.

[0391] In some embodiments of the compositions and methods of the disclosure, a disease or disorder of the disclosure includes, but is not limited to, a cardiovascular disease or disorder.

[0392] In some embodiments of the compositions and methods of the disclosure, a disease or disorder of the disclosure includes, but is not limited to, a proliferative disease or disorder. In some embodiments, the proliferative disease or disorder is a cancer. In some embodiments, the cancer includes, but is not limited to, Acute Lymphoblastic Leukemia (ALL), Acute Myeloid Leukemia (AML), Adrenocortical Carcinoma, AIDS-Related Cancers, Kaposi Sarcoma (Soft Tissue Sarcoma), AIDS-Related Lymphoma (Lymphoma), Primary CNS Lymphoma (Lymphoma), Anal Cancer, Appendix Cancer, Gastrointestinal Carcinoid Tumors, Astrocytomas, Atypical Teratoid/Rhabdoid Tumor, Central Nervous System (Brain Cancer), Basal Cell Carcinoma, Bile Duct Cancer, Bladder Cancer, Bone Cancer, Ewing Sarcoma, Osteosarcoma, Malignant Fibrous Histiocytoma, Brain Tumors, Breast Cancer, Burkitt Lymphoma, Carcinoid Tumor, Carcinoma, Cardiac (Heart) Tumors, Embryonal Tumors, Germ Cell Tumor, Primary CNS Lymphoma, Cervical Cancer, Cholangiocarcinoma, Chordoma, Chronic Lymphocytic Leukemia (CLL), Chronic Myelogenous Leukemia (CML), Chronic Myeloproliferative Neoplasms, Colorectal Cancer, Craniopharyngioma, Cutaneous T-Cell Lymphoma, Ductal Carcinoma In Situ, Embryonal Tumors, Endometrial Cancer (Uterine Cancer), Ependymoma, Esophageal Cancer, Esthesioneuroblastoma (Head and Neck Cancer), Ewing Sarcoma (Bone Cancer), Extracranial Germ Cell Tumor, Extragonadal Germ Cell Tumor, Eye Cancer, Childhood Intraocular Melanoma, Intraocular Melanoma, Retinoblastoma, Fallopian Tube Cancer, Fibrous Histiocytoma of Bone, Malignant, and Osteosarcoma, Gallbladder Cancer, Gastric (Stomach) Cancer, Gastrointestinal Carcinoid Tumor, Gastrointestinal Stromal Tumors (GIST) (Soft Tissue Sarcoma), Childhood Gastrointestinal Stromal Tumors, Germ Cell Tumors, Childhood Extracranial Germ Cell Tumors, Extragonadal Germ Cell Tumors, Ovarian Germ Cell Tumors, Testicular Cancer, Gestational Trophoblastic Disease, Hairy Cell Leukemia, Head and Neck Cancer, Heart Tumors, Hepatocellular (Liver) Cancer, Histiocytosis, Hodgkin Lymphoma, Hypopharyngeal Cancer (Head and Neck Cancer), Intraocular Melanoma, Islet Cell Tumors, Pancreatic Neuroendocrine Tumors, Kaposi Sarcoma (Soft Tissue Sarcoma), Kidney (Renal Cell) Cancer, Langerhans Cell Histiocytosis, Laryngeal Cancer (Head and Neck Cancer), Leukemia, Lip and Oral Cavity Cancer (Head and Neck Cancer), Liver Cancer, Lung Cancer (Non-Small Cell and Small Cell), Childhood Lung Cancer, Lymphoma, Male Breast Cancer, Malignant Fibrous Histiocytoma of Bone and Osteosarcoma, Melanoma, Merkel Cell Carcinoma (Skin Cancer), Mesothelioma, Metastatic Squamous Neck Cancer with Occult Primary (Head and Neck Cancer), Midline Tract Carcinoma With NUT Gene Changes, Mouth Cancer (Head and Neck Cancer), Multiple Endocrine Neoplasia Syndromes, Multiple Myeloma/Plasma Cell Neoplasms, Mycosis Fungoides (Lymphoma), Myelodysplastic Syndromes, Myelodysplastic/Myeloproliferative Neoplasms, Nasal Cavity and Paranasal Sinus Cancer (Head and Neck Cancer), Nasopharyngeal Cancer (Head and Neck Cancer), Neuroblastoma, Non-Hodgkin Lymphoma, Non-Small Cell Lung Cancer, Oral Cancer, Lip and Oral Cavity Cancer and Oropharyngeal Cancer, Osteosarcoma and Malignant Fibrous Histiocytoma of Bone, Ovarian Cancer, Pancreatic Cancer, Pancreatic Neuroendocrine Tumors (Islet Cell Tumors), Papillomatosis, Paraganglioma, Parathyroid Cancer, Penile Cancer, Pharyngeal Cancer (Head and Neck Cancer), Pheochromocytoma, Plasma Cell Neoplasm/Multiple Myeloma, Pleuropulmonary Blastoma, Pregnancy and Breast Cancer, Primary Central Nervous System (CNS) Lymphoma, Primary Peritoneal Cancer, Prostate Cancer, Rectal Cancer, Recurrent Cancer, Renal Cell (Kidney) Cancer, Retinoblastoma, Rhabdomyosarcoma, Childhood (Soft Tissue Sarcoma), Salivary Gland Cancer (Head and Neck Cancer), Sarcoma, Childhood Rhabdomyosarcoma (Soft Tissue Sarcoma), Childhood Vascular Tumors (Soft Tissue Sarcoma), Ewing Sarcoma (Bone Cancer), Kaposi Sarcoma (Soft Tissue Sarcoma), Osteosarcoma (Bone Cancer), Uterine Sarcoma, Sézary Syndrome, Lymphoma, Skin Cancer, Small Cell Lung Cancer, Small Intestine Cancer, Soft Tissue Sarcoma, Squamous Cell Carcinoma of the Skin, Squamous Neck Cancer, Stomach (Gastric) Cancer, T-Cell Lymphoma, Testicular Cancer, Throat Cancer (Head and Neck Cancer), Nasopharyngeal Cancer, Oropharyngeal Cancer, Hypopharyngeal Cancer, Thymoma and Thymic Carcinoma, Thyroid Cancer, Transitional Cell Cancer of the Renal Pelvis and Ureter, Renal Cell Cancer, Urethral Cancer, Uterine Sarcoma, Vaginal Cancer, Vascular Tumors (Soft Tissue Sarcoma), Vulvar Cancer, Wilms Tumor and Other Childhood Kidney Tumors.

[0393] In some embodiments of the methods of the disclosure, a subject of the disclosure has been diagnosed with the disease or disorder. In some embodiments, the subject of the disclosure presents at least one sign or symptom of the disease or disorder. In some embodiments, the subject has a biomarker predictive of a risk of developing the disease or disorder. In some embodiments, the biomarker is a genetic mutation.

[0394] In some embodiments of the methods of the disclosure, a subject of the disclosure is female. In some embodiments of the methods of the disclosure, a subject of the disclosure is male. In some embodiments, a subject of the disclosure has two XX or XY chromosomes. In some embodiments, a subject of the disclosure has two XX or XY chromosomes and a third chromosome, either an X or a Y.

[0395] In some embodiments of the methods of the disclosure, a subject of the disclosure is a neonate, an infant, a child, an adult, a senior adult, or an elderly adult. In some embodiments of the methods of the disclosure, a subject of the disclosure is at least 1, 2, 3, 4, 5,6, 7, 8, 9, 10, 11, 12, 13, 14, 15, 16, 17, 18, 19, 20, 21, 22, 23, 24, 25, 26, 27,28, 29, 30 or 31 days old. In some embodiments of the methods of the disclosure, a subject of the disclosure is at least 1, 2, 3, 4, 5, 6, 7, 8, 9, 10, 11 or 12 months old. In some embodiments of the methods of the disclosure, a subject of the disclosure is at least 1, 2, 3, 4, 5, 6, 7, 8, 9, 10, 15, 20, 25, 30, 35, 40, 45, 50, 55, 60, 65, 70, 75, 80, 85, 90, 95, 100 or any number of years or partial years in between of age.

[0396] In some embodiments of the methods of the disclosure, a subject of the disclosure is a mammal. In some embodiments, a subject of the disclosure is a non-human mammal.

[0397] In some embodiments of the methods of the disclosure, a subject of the disclosure is a human.

[0398] In some embodiments of the methods of the disclosure, a therapeutically effective amount comprises a single dose of a composition of the disclosure. In some embodiments, a therapeutically effective amount comprises a therapeutically effective amount comprises at least one dose of a composition of the disclosure. In some embodiments, a therapeutically effective amount comprises a therapeutically effective amount comprises one or more dose(s) of a composition of the disclosure.

[0399] In some embodiments of the methods of the disclosure, a therapeutically effective amount eliminates a sign or symptom of the disease or disorder. In some embodiments, a therapeutically effective amount reduces a severity of a sign or symptom of the disease or disorder.

[0400] In some embodiments of the methods of the disclosure, a therapeutically effective amount eliminates the disease or disorder.

[0401] In some embodiments of the methods of the disclosure, a therapeutically effective amount prevents an onset of a disease or disorder. In some embodiments, a therapeutically effective amount delays the onset of a disease or disorder. In some embodiments, a therapeutically effective amount reduces the severity of a sign or symptom of the disease or disorder. In some embodiments, a therapeutically effective amount improves a prognosis for the subject.

[0402] In some embodiments of the methods of the disclosure, a composition of the disclosure is administered to the subject systemically. In some embodiments, the composition of the disclosure is administered to the subject by an intravenous route. In some embodiments, the composition of the disclosure is administered to the subject by an injection or an infusion.

[0403] In some embodiments of the methods of the disclosure, a composition of the disclosure is administered to the subject locally. In some embodiments, the composition of the disclosure is administered to the subject by an intraosseous, intraocular, intracerebrospinal or intraspinal route. In some embodiments, the composition of the disclosure is administered directly to the cerebral spinal fluid of the central nervous system. In some embodiments, the composition of the disclosure is administered directly to a tissue or fluid of the eye and does not have bioavailability outside of ocular structures. In some embodiments, the composition of the disclosure is administered to the subject by an injection or an infusion.

[0404] In some embodiments, the compositions comprising the RNA-binding fusion proteins disclosed herein are formulated as pharmaceutical compositions. Briefly, pharmaceutical compositions for use as disclosed herein may comprise a fusion protein(s) or a polynucleotide encoding the fusion protein(s), optionally comprised in an AAV, which is optionally also immune orthogonal, in combination with one or more pharmaceutically or physiologically acceptable carriers, diluents or excipients. Such compositions may comprise buffers such as neutral buffered saline, phosphate buffered saline and the like; carbohydrates such as glucose, mannose, sucrose or dextrans, mannitol; proteins; polypeptides or amino acids such as glycine; antioxidants; chelating agents such as EDTA or glutathione; adjuvants (e.g., aluminum hydroxide); and preservatives. Compositions of the disclosure may be formulated for oral, intravenous, topical, enteral, intraocular, and/or parenteral administration. In certain embodiments, the compositions of the present disclosure are formulated for intravenous administration.

### EXAMPLES

### Example 1

### RNA-Guided Cleavage of Viral RNA Molecules

[0405] A549 cells were cultured in DMEM with 10% FBS and 1% penicillin/streptomycin (GIBCO) and passaged at 90%-100% confluency. Cells were seeded at 1×10̂5 cells per well of a 24-well plate for RNA isolation or 0.5×10̂5 cells per well. Cells were transfected with plasmids encoding Campylobacter jejuni Cas9 (CjeCas9) fused to the gene NTHL1 (residues 31-312, E43) or CPSF4L (full length, E67) with plasmids encoding one of four sites in Zika NS5 RNA. CjeCas9 was driven by an EFS promoter while the guide RNAs were driven by U6 promoter. The sequences of the sgRNAs are presented in Table 8. The sequences of the constructs used in this stud are presented below (SEQ ID NO: 13656 and SEQ ID NO: 13657).

[0406] RNA isolations were carried out with RNAeasy columns (Qiagen) according to the manufacturer's protocol. RNA quality and concentrations were estimated using the Nanodrop spectrophotometer. cDNA preparation was done using Superscript III (Thermo) with random primers according to the manufacturer's protocol. qPCR was carried out with the following primers as listed in Table 7.

[0407] FIG. 1 shows expression levels of Zika NS5 assessed in the presence of both E43 and E67 endonucleases with sgRNAs containing the various NS5-targeting spacer sequences as indicated in Table 8. Zika NS5 expression is displayed as fold change relative to the endonuclease loaded with an sgRNA containing a control (Lambda) spacer sequence.

[0408] Immunofluorescence microscopy was used to visualize Zika NS5 expression in the presence of E43 or E67 endonucleases fused to CjeCas9. FIG. 2A shows a fluorescence microscopy image of cells transfected with CjeCas9-endonuclease fusions loaded with an sgRNA containing a Zika NS5-targeting spacer sequence. Expression of Zika NS5 is markedly decreased in the presence of CjeCas9-endonuclease fusions loaded with the appropriate Zika NS5-targeting sgRNA as compared to a CjeCas9-endonuclease fusion loaded with a non-Zika NS5 targeting sgRNA (FIGS. 2A and 2B). FIG. 3 is a list of exemplary endonucleases for use in the compositions of the disclosure.

TABLE 7
qPCR primers

| | |
|---|---|
| GAPDH_F | CAGCCTCAAGATCATCAGCAA (SEQ ID NO: 192) |
| GAPDH_R | TGTGGTCATGAGTCCTTCCA (SEQ ID NO: 193) |
| NS5_F | GAGGAGAGTGCCAGAGTTGT (SEQ ID NO: 194) |
| NS5_R | TCTCTCTCCCCATCCAGTGA (SEQ ID NO: 195) |

TABLE 8
sgRNA sequences

| | |
|---|---|
| NS5-targeting spacer 1 | gcaatgatcttcatgttgggagc (SEQ ID NO: 196) |
| NS5-targeting spacer 2 | gaaccttgttgatgaactcttc (SEQ ID NO: 197) |
| NS5-targeting spacer 3 | gttggtgattagagcttcattc (SEQ ID NO: 198) |
| NS5-targeting spacer 4 | gagtgatcctcgttcaagaatcc (SEQ ID NO: 199) |
| Non-targeting control | GTGATAAGTGGAATGCCATG (SEQ ID NO: 200) |
| spacer (λ2) | |
| sgRNA scaffold (N's | GNNNNNNNNNNNNNNNNNNNNGUUUAAGAGCUAUG |
| indicate spacer) | CUGGAAACAGCAUAGCAAGUUUAAAUAAGGCUAGU |
| | CCGUUAUCAACUUGAAAAAGUGGCACCGAGUCGGU |
| | GCUUUUUUU (SEQ ID NO: 201) |

[0409] A E43-CjeCas9 and sgRNA plasmid may comprise or consist of the sequence (U6:

[0410] N′s=sgRNA spacer, E43, CieCas9):

(SEQ ID NO: 202)

gtttattacagggacagcagagatccagtttggttaattaaggtaccgag
ggcctatttcccatgattccttcatatttgcatatacgatacaaggctgt
tagagagataattagaattaatttgactgtaaacacaaagatattagtac
aaaatacgtgacgtagaaagtaataatttcttgggtagtttgcagtttta
aaattatgttttaaaatggactatcatatgcttaccgtaacttgaaagta
tttcgatttcttggctttatatatcttGTGGAAAGGACGAAACACCNNNN
NNNNNNNNNNNNNNNGTTTTAGTCCCTGAAGGGACTAAAATAAAGAGTTT
GCGGGACTCTGCGGGGTTACAATCCCCTAAAACCGCTTTTTTTCCTGCAG
CCCGGGGGATCCACTAGTTCTAGAGCGGCCGCCACCGCGGTGGAGCTCCA
GCTTTTGTTCCCTTTAGTGAGGGTTAATTGCGCGAATTCGCTAGCTAGGT
CTTGAAAGGAGTGGGAATTGGCTCCGGTGCCCGTCAGTGGGCAGAGCGCA
CATCGCCCACAGTCCCCGAGAAGTTGGGGGGAGGGGTCGGCAATTGATCC
GGTGCCTAGAGAAGGTGGCGCGGGGTAAACTGGGAAAGTGATGTCGTGTA
CTGGCTCCGCCTTTTTCCCGAGGGTGGGGGAGAACCGTATATAAGTGCAG
TAGTCGCCGTGAACGTTCTTTTTCGCAACGGGTTTGCCGCCAGAACACAG
GACCGGTTCTAGAGCGCTATTTAGAACCatgTGTTCTCCCCAAGAATCTG
GCATGACCGCTCTTTCAGCGAGGATGTTGACGCGAAGCAGATCCCTGGGA
CCTGGGGCCGGGCCACGAGGGTGTCGGGAAGAACCAGGACCGTTGCGACG
GAGGGAAGCAGCAGCGGAAGCTCGGAAATCCCATTCTCCGGTTAAACGAC
CCCGCAAGGCACAACGGCTCAGGGTTGCTTACGAGGGGAGCGATTCCGAA
AAGGGTGAAGGAGCAGAGCCCTTGAAGGTTCCAGTATGGGAACCCCAGGA
TTGGCAGCAGCAGCTTGTAAACATCCGAGCAATGAGGAACAAAAAAGATG
CACCTGTTGATCACCTCGGAACCGAACATTGTTATGATTCTAGTGCGCCG
CCAAAAGTCCGCCGGTATCAGGTTCTGTTGAGTTTGATGCTGAGTAGTCA
GACTAAGGACCAGGTTACGGCCGGAGCAATGCAACGGCTTCGGGCACGGG
GACTCACGGTCGATAGCATTTTGCAGACCGATGACGCAACATTGGGTAAA
CTCATATATCCAGTTGGCTTCTGGCGGAGCAAAGTGAAGTACATCAAGCA
GACCTCAGCCATTCTCCAACAACATTACGGAGGTGATATACCCGCAAGCG
TAGCTGAACTGGTAGCACTGCCGGGCGTCGGTCCCAAAATGGCACATCTG
GCTATGGCGGTTGCTTGGGGAACGGTGTCTGGTATCGCAGTTGATACGCA
TGTCCACCGCATCGCCAATCGGCTGAGGTGGACTAAAAAAGCCACTAAGT
CTCCTGAAGAAACACGGGCTGCTCTGGAAGAGTGGCTTCCACGAGAGCTG
TGGCATGAAATCAATGGATTGCTGGTTGGTTTCGGGCAGCAGACATGCTT
GCCCGTGCACCCCCGGTGTCATGCTTGCTTGAACCAGGCTTTGTGCCCAG
CTGCCCAGGGCCTGAGTGGAAGTGAGACACCGGGAACATCTGAGTCTGCG
ACCCCGGAGAGCacaaacGCGCGAATCCTGGCCTTCGcgATTGGCATTAG
CAGCATCGGCTGGGCATTCTCTGAAAACGACGAACTGAAGGATTGCGGCG
TGCGAATTTTCACTAAGGTCGAAAATCCCAAAACTGGTGAATCACTCGCT
CTCCCTAGACGACTGGCACGCTCCGCACGAAAGAGGCTTGCCCGCCGCAA
GGCACGCTTGAACCATCTTAAACACCTTATTGCAAATGAGTTTAAACTGA
ATTATGAGGACTACCAATCCTTTGACGAGTCTCTTGCTAAAGCCTACAAA
GGGAGCCTTATATCCCCGTATGAGCTCCGGTTCAGAGCACTCAACGAACT
GCTGTCCAAACAGGATTTTGCTCGCGTGATTCTCCACATAGCGAAGAGGC
GAGGATACGATGACATTAAAAACAGTGATGATAAGGAAAAAGGGGCCATA
CTCAAAGCGATTAAGCAAAATGAAGAGAAGCTCGCTAACTATCAATCAGT
AGGGGAGTATCTCTATAAAGAGTACTTCCAGAAGTTCAAAGAAAATAGCA
AGGAATTTACTAATGTCCGGAATAAAAAGGAGTCTTACGAAAGATGTATT
GCGCAATCTTTCCTCAAGGACGAGCTCAAATTGATTTTCAAGAAACAAAG
GGAATTTGGGTTCAGCTTCTCAAAAAAATTTGAGGAAGAGGTTCTGAGCG
TTGCCTTTTACAAACGCGCCCTTAAGGACTTCTCACATCTCGTAGGGAAT
TGTAGTTTCTTCACCGATGAAAAACGGGCGCCAAAAAATAGCCCTTTGGC
TTTTATGTTTGTCGCTCTGACTCGCATCATTAATCTGCTCAACAACCTTA
AAAACACGGAAGGGATTCTGTACACAAAGGATGATCTGAACGCTCTGCTT
AACGAAGTTTTGAAGAACGGGACTTTGACCTACAAACAAACCAAAAAGCT
TCTTGGTCTCAGTGATGACTACGAATTCAAGGGAGAAAAAGGGACATATT
TCATCGAATTCAAGAAGTATAAGGAGTTCATCAAAGCCTTGGGCGAGCAC
AACTTGTCTCAAGATGATCTCAACGAAATTGCTAAGGATATCACTCTGAT
TAAAGACGAGATCAAGCTCAAAAAGGCGTTGGCGAAGTATGACCTTAACC
AAAACCAAATAGATAGCCTCAGCAAGTTGGAATTTAAAGATCACTTGAAT
ATAAGTTTCAAGGCCCTTAAGTTGGTCACCCCCTTGATGCTTGAAGGAAA
GAAATATGATGAGGCATGTAATGAGCTGAATCTCAAGGTTGCTATTAACG
AAGACAAAAAAGATTTCCTCCCAGCTTTCAATGAGACTTACTATAAGGAC
GAGGTTACCAATCCTGTGGTGCTCCGAGCCATCAAAGAGTATCGAAAGGT
CCTGAATGCTTTGCTCAAAAAATACGGTAAGGTACACAAAATAAATATTG
AGCTCGCAAGGGAGGTCGGTAAGAACCACTCCCAGCGCGCCAAAATAGAA
AAGGAACAGAATGAAAATTACAAAGCGAAAAAGGACGCCGAGCTCGAGTG
CGAAAAGCTGGGCCTGAAAATAAACAGCAAGAACATTCTCAAACTCCGCC
TCTTCAAAGAACAAAAAGAATTTTGTGCTTATAGTGGTGAGAAAATAAAA
ATCTCCGATCTTCAAGACGAGAAGATGCTCGAAATAGACgcgATATATCC
ATATAGCAGGTCTTTTGACGATTCTTACATGAATAAAGTGCTTGTTTTCA
CTAAGCAGAATCAGGAAAAGTTGAATCAGACCCCCTTTGAGGCCTTTGGC
AACGACTCAGCAAAGTGGCAGAAGATCGAGGTCTTGGCTAAGAATCTTCC
TACTAAGAAACAGAAAAGGATATTGGATAAGAACTATAAAGACAAAGAAC
AAAAGAACTTTAAAGACCGCAACCTCAATGACACCAGATACATAGCAAGA
TTGGTTCTGAACTACACAAAAGATTATTTGGACTTCTTGCCGCTGTCTGA
TGATGAGAACACGAAACTCAACGACACGCAAAAGGGGTCTAAAGTCCACG
TCGAAGCTAAATCTGGGATGCTCACCTCAGCATTGAGGCATACGTGGGGA
TTCTCAGCAAAGGACCGAAACAATCACCTGCACCATGCCATTGACGCAGT
TATCATAGCGTATGCCAATAATTCAATAGTAAAAGCGTTTAGCGACTTCA
AGAAGGAACAAGAGTCCAACAGCGCCGAGCTCTACGCAAAAAAGATTAGT
GAACTCGACTACAAAAACAAAAGAAAATTCTTTGAGCCGTTCAGCGGATT
TCGACAGAAGGTATTGGATAAAATAGATGAAATTTTCGTGAGCAAACCCG
AAAGGAAAAAGCCCTCAGGCGCCTTGCACGAAGAGACTTTCAGGAAGGAA
GAGGAATTCTACCAAAGCTACGGCGGAAAAGAGGGAGTTTTGAAGGCTCT
CGAACTTGGAAAGATTAGGAAGGTGAACGGCAAGATAGTGAAAAACGGCG
ATATGTTCCGGGTTGATATCTTCAAACATAAAAAAACGAATAAATTTTAT
GCTGTGCCTATATACACTATGGACTTCGCACTTAAGGTCCTGCCGAATAA
GGCGGTAGCCCGATCTAAAAAAGGCGAAATTAAGGACTGGATTTTGATGG
ATGAAAATTACGAGTTCTGCTTTTCTCTCTACAAGGATTCCCTTATATTG
ATACAGACGAAAGATATGCAGGAACCGGAATTCGTGTATTACAACGCTTT
TACTTCCTCTACGGTATCTTTGATTGTCTCCAAACATGACAACAAATTCG
AAACACTCAGTAAAAACCAAAAGATTCTCTTTAAAAATGCGAACGAGAAA
GAAGTAATTGCAAAATCAATTGGCATCCAAAATTTGAAAGTTTTTGAAAA
ATATATAGTATCTGCCCTCGGAGAGGTTACTAAAGCGGAATTTAGACAGC
GAGAGGACTTCAAAAAATCAGGTCCACCCAAGAAAAAACGCAAGGTGGAA
GATCCGAAGAAAAAGCGAAAAGTGGATGTGtaaCGTTTTCCGGGACGCCG
GCTGGATGATCCTCCAGCGCGGGGATCTCATGCTGGAGTTCTTCGCCCAC
CCCAACTTGTTTATTGCAGCTTATAATGGTTACAAATAAAGCAATAGCAT
CACAAATTTCACAAATAAAGCATTTTTTTCACTGCATTCTAGTTGTGGTT
TGTCCAAACTCATCAATGTATCTTATCATGTCTGTATACCG.

[0411] A E67-CjeCas9 and sgRNA plasmid may comprise or consist of the sequence (U6: N′s=sgRNA spacer, E67, CieCas9):

(SEQ ID NO: 203)

gtttattacagggacagcagagatccagtttggttaattaaggtaccgag
ggcctatttcccatgattccttcatatttgcatatacgatacaaggctgt
tagagagataattagaattaatttgactgtaaacacaaagatattagtac
aaaatacgtgacgtagaaagtaataatttcttgggtagtttgcagtttta
aaattatgttttaaaatggactatcatatgcttaccgtaacttgaaagta
tttcgatttcttggctttatatatcttGTGGAAAGGACGAAACACCNNNN
NNNNNNNNNNNNNNNGTTTTAGTCCCTGAAGGGACTAAAATAAAGAGTTT
GCGGGACTCTGCGGGGTTACAATCCCCTAAAACCGCTTTTTTTCCTGCAG
CCCGGGGGATCCACTAGTTCTAGAGCGGCCGCCACCGCGGTGGAGCTCCA
GCTTTTGTTCCCTTTAGTGAGGGTTAATTGCGCGAATTCGCTAGCTAGGT
CTTGAAAGGAGTGGGAATTGGCTCCGGTGCCCGTCAGTGGGCAGAGCGCA
CATCGCCCACAGTCCCCGAGAAGTTGGGGGGAGGGGTCGGCAATTGATCC
GGTGCCTAGAGAAGGTGGCGCGGGGTAAACTGGGAAAGTGATGTCGTGTA
CTGGCTCCGCCTTTTTCCCGAGGGTGGGGGAGAACCGTATATAAGTGCAG
TAGTCGCCGTGAACGTTCTTTTTCGCAACGGGTTTGCCGCCAGAACACAG
GACCGGTTCTAGAGCGCTATTTAGAACCatgCAGGAGGTAATAGCGGGGC
TTGAGCGATTTACCTTTGCCTTCGAAAAAGACGTAGAGATGCAGAAGGGA
ACCGGCCTGCTCCCATTTCAAGGTATGGACAAATCAGCATCTGCCGTGTG
CAATTTTTTCACCAAGGGTCTGTGTGAAAAGGGGAAGCTCTGTCCATTTC
GCCATGATCGCGGAGAGAAGATGGTGGTGTGTAAGCACTGGCTGAGAGGG
CTTTGCAAAAAAGGCGACCACTGCAAATTTCTTCACCAATATGACCTGAC
TCGAATGCCTGAGTGTTATTTTTACAGTAAGTTCGGTGACTGTAGCAACA
AAGAATGCAGCTTCTTGCATGTCAAACCAGCATTCAAGTCACAGGATTGC
CCGTGGTACGATCAGGGTTTTTGCAAGGACGGTCCCCTCTGCAAATATCG
ACACGTACCCAGAATTATGTGCCTTAATTACCTGGTCGGCTTCTGTCCTG
AAGGGCCAAAATGTCAGTTTGCTCAAAAAATTCGCGAGTTCAAATTGCTC
CCTGGGTCTAAAATTTGGGAACCCCAGGATTGGCAGCAGCAGCTTGTAAA
CATCCGAGCAATGAGGAACAAAAAAGATGCACCTGTTGATCACCTCGGAA
CCGAACATTGTTATGATTCTAGTGCGCCGCCAAAAGTCCGCCGGTATCAG
GTTCTGTTGAGTTTGATGCTGAGTAGTCAGACTAAGGACCAGGTTACGGC
CGGAGCAATGCAACGGCTTCGGGCACGGGGACTCACGGTCGATAGCATTT
TGCAGACCGATGACGCAACATTGGGTAAACTCATATATCCAGTTGGCTTC
TGGCGGAGCAAAGTGAAGTACATCAAGCAGACCTCAGCCATTCTCCAACA
ACATTACGGAGGTGATATACCCGCAAGCGTAGCTGAACTGGTAGCACTGC
CGGGCGTCGGTCCCAAAATGGCACATCTGGCTATGGCGGTTGCTTGGGGA
ACGGTGTCTGGTATCGCAGTTGATACGCATGTCCACCGCATCGCCAATCG
GCTGAGGTGGACTAAAAAAGCCACTAAGTCTCCTGAAGAAACACGGGCTG
CTCTGGAAGAGTGGCTTCCACGAGAGCTGTGGCATGAAATCAATGGATTG
CTGGTTGGTTTCGGGCAGCAGACATGCTTGCCCGTGCACCCCCGGTGTCA
TGCTTGCTTGAACCAGGCTTTGTGCCCAGCTGCCCAGGGCCTGAGTGGAA
GTGAGACACCGGGAACATCTGAGTCTGCGACCCCGGAGAGCacaaacGCG
CGAATCCTGGCCTTCGcgATTGGCATTAGCAGCATCGGCTGGGCATTCTC
TGAAAACGACGAACTGAAGGATTGCGGCGTGCGAATTTTCACTAAGGTCG
AAAATCCCAAAACTGGTGAATCACTCGCTCTCCCTAGACGACTGGCACGC
TCCGCACGAAAGAGGCTTGCCCGCCGCAAGGCACGCTTGAACCATCTTAA
ACACCTTATTGCAAATGAGTTTAAACTGAATTATGAGGACTACCAATCCT
TTGACGAGTCTCTTGCTAAAGCCTACAAAGGGAGCCTTATATCCCCGTAT
GAGCTCCGGTTCAGAGCACTCAACGAACTGCTGTCCAAACAGGATTTTGC
TCGCGTGATTCTCCACATAGCGAAGAGGCGAGGATACGATGACATTAAAA
ACAGTGATGATAAGGAAAAAGGGGCCATACTCAAAGCGATTAAGCAAAAT
GAAGAGAAGCTCGCTAACTATCAATCAGTAGGGGAGTATCTCTATAAAGA
GTACTTCCAGAAGTTCAAAGAAAATAGCAAGGAATTTACTAATGTCCGGA
ATAAAAAGGAGTCTTACGAAAGATGTATTGCGCAATCTTTCCTCAAGGAC
GAGCTCAAATTGATTTTCAAGAAACAAAGGGAATTTGGGTTCAGCTTCTC
AAAAAAATTTGAGGAAGAGGTTCTGAGCGTTGCCTTTTACAAACGCGCCC
TTAAGGACTTCTCACATCTCGTAGGGAATTGTAGTTTCTTCACCGATGAA
AAACGGGCGCCAAAAAATAGCCCTTTGGCTTTTATGTTTGTCGCTCTGAC
TCGCATCATTAATCTGCTCAACAACCTTAAAAACACGGAAGGGATTCTGT
ACACAAAGGATGATCTGAACGCTCTGCTTAACGAAGTTTTGAAGAACGGG
ACTTTGACCTACAAACAAACCAAAAAGCTTCTTGGTCTCAGTGATGACTA
CGAATTCAAGGGAGAAAAAGGGACATATTTCATCGAATTCAAGAAGTATA
AGGAGTTCATCAAAGCCTTGGGCGAGCACAACTTGTCTCAAGATGATCTC
AACGAAATTGCTAAGGATATCACTCTGATTAAAGACGAGATCAAGCTCAA
AAAGGCGTTGGCGAAGTATGACCTTAACCAAAACCAAATAGATAGCCTCA
GCAAGTTGGAATTTAAAGATCACTTGAATATAAGTTTCAAGGCCCTTAAG
TTGGTCACCCCCTTGATGCTTGAAGGAAAGAAATATGATGAGGCATGTAA
TGAGCTGAATCTCAAGGTTGCTATTAACGAAGACAAAAAAGATTTCCTCC
CAGCTTTCAATGAGACTTACTATAAGGACGAGGTTACCAATCCTGTGGTG
CTCCGAGCCATCAAAGAGTATCGAAAGGTCCTGAATGCTTTGCTCAAAAA
ATACGGTAAGGTACACAAAATAAATATTGAGCTCGCAAGGGAGGTCGGTA
AGAACCACTCCCAGCGCGCCAAAATAGAAAAGGAACAGAATGAAAATTAC
AAAGCGAAAAAGGACGCCGAGCTCGAGTGCGAAAAGCTGGGCCTGAAAAT
AAACAGCAAGAACATTCTCAAACTCCGCCTCTTCAAAGAACAAAAAGAAT
TTTGTGCTTATAGTGGTGAGAAAATAAAAATCTCCGATCTTCAAGACGAG
AAGATGCTCGAAATAGACgcgATATATCCATATAGCAGGTCTTTTGACGA
TTCTTACATGAATAAAGTGCTTGTTTTCACTAAGCAGAATCAGGAAAAGT
TGAATCAGACCCCCTTTGAGGCCTTTGGCAACGACTCAGCAAAGTGGCAG
AAGATCGAGGTCTTGGCTAAGAATCTTCCTACTAAGAAACAGAAAAGGAT
ATTGGATAAGAACTATAAAGACAAAGAACAAAAGAACTTTAAAGACCGCA
ACCTCAATGACACCAGATACATAGCAAGATTGGTTCTGAACTACACAAAA
GATTATTTGGACTTCTTGCCGCTGTCTGATGATGAGAACACGAAACTCAA
CGACACGCAAAAGGGGTCTAAAGTCCACGTCGAAGCTAAATCTGGGATGC
TCACCTCAGCATTGAGGCATACGTGGGGATTCTCAGCAAAGGACCGAAAC
AATCACCTGCACCATGCCATTGACGCAGTTATCATAGCGTATGCCAATAA
TTCAATAGTAAAAGCGTTTAGCGACTTCAAGAAGGAACAAGAGTCCAACA
GCGCCGAGCTCTACGCAAAAAAGATTAGTGAACTCGACTACAAAAACAAA
AGAAAATTCTTTGAGCCGTTCAGCGGATTTCGACAGAAGGTATTGGATAA
AATAGATGAAATTTTCGTGAGCAAACCCGAAAGGAAAAAGCCCTCAGGCG
CCTTGCACGAAGAGACTTTCAGGAAGGAAGAGGAATTCTACCAAAGCTAC
GGCGGAAAAGAGGGAGTTTTGAAGGCTCTCGAACTTGGAAAGATTAGGAA
GGTGAACGGCAAGATAGTGAAAAACGGCGATATGTTCCGGGTTGATATCT
TCAAACATAAAAAAACGAATAAATTTTATGCTGTGCCTATATACACTATG
GACTTCGCACTTAAGGTCCTGCCGAATAAGGCGGTAGCCCGATCTAAAAA
AGGCGAAATTAAGGACTGGATTTTGATGGATGAAAATTACGAGTTCTGCT
TTTCTCTCTACAAGGATTCCCTTATATTGATACAGACGAAAGATATGCAG
GAACCGGAATTCGTGTATTACAACGCTTTTACTTCCTCTACGGTATCTTT
GATTGTCTCCAAACATGACAACAAATTCGAAACACTCAGTAAAAACCAAA
AGATTCTCTTTAAAAATGCGAACGAGAAAGAAGTAATTGCAAAATCAATT
GGCATCCAAAATTTGAAAGTTTTTGAAAAATATATAGTATCTGCCCTCGG
AGAGGTTACTAAAGCGGAATTTAGACAGCGAGAGGACTTCAAAAAATCAG
GTCCACCCAAGAAAAAACGCAAGGTGGAAGATCCGAAGAAAAAGCGAAAA
GTGGATGTGtaaCGTTTTCCGGGACGCCGGCTGGATGATCCTCCAGCGCG
GGGATCTCATGCTGGAGTTCTTCGCCCACCCCAACTTGTTTATTGCAGCT
TATAATGGTTACAAATAAAGCAATAGCATCACAAATTTCACAAATAAAGC
ATTTTTTTCACTGCATTCTAGTTGTGGTTTGTCCAAACTCATCAATGTAT
CTTATCATGTCTGTATACCG.

### Example Embodiments

[0412] Embodiment 1. A composition comprising:

[0413] (a) a first sequence comprising a first guide RNA (gRNA) that specifically binds a target sequence within an RNA molecule, wherein the target sequence comprises a sequence encoding a component of an adaptive immune response and

[0414] (b) a sequence encoding a fusion protein, the sequence comprising a sequence encoding a first RNA-binding polypeptide and a sequence encoding a second RNA-binding polypeptide,

[0415] wherein neither the first RNA-binding polypeptide nor the second RNA-binding polypeptide comprises a significant DNA-nuclease activity,

[0416] wherein the first RNA-binding polypeptide and the second RNA-binding polypeptide are not identical, and

[0417] wherein the second RNA-binding polypeptide comprises an RNA-nuclease activity.
[0418] Embodiment 2. A composition comprising: (a) a first sequence comprising a first guide RNA (gRNA) that specifically binds a first target sequence within a first RNA molecule, wherein the first target sequence comprises a sequence encoding a component of an adaptive immune response and

[0419] (b) a second sequence comprising a second guide RNA (gRNA) that specifically binds a second target sequence within a second RNA molecule and

[0420] (c) a sequence encoding a fusion protein, the sequence comprising a sequence encoding a first RNA-binding polypeptide and a sequence encoding a second RNA-binding polypeptide,

[0421] wherein neither the first RNA-binding polypeptide nor the second RNA-binding polypeptide comprises a significant DNA-nuclease activity,

[0422] wherein the first RNA-binding polypeptide and the second RNA-binding polypeptide are not identical, and

[0423] wherein the second RNA-binding polypeptide comprises an RNA-nuclease activity.
[0424] Embodiment 3. The composition of embodiment 2, wherein the first target sequence or the second target sequence comprises at least one repeated sequence.
[0425] Embodiment 4. The composition of embodiment 2, wherein the first sequence comprising the first gRNA further comprises a first promoter capable of expressing the gRNA in a eukaryotic cell and/or the second sequence comprising the second gRNA further comprises a second promoter capable of expressing the gRNA in a eukaryotic cell.
[0426] Embodiment 5. The composition of embodiment 2, wherein a sequence comprising the first sequence comprising the first gRNA and the second sequence comprising the second gRNA comprises a promoter capable of expressing the first gRNA and the second gRNA in a eukaryotic cell.
[0427] Embodiment 6. The composition of embodiment 4, wherein the first promoter and the second promoter are identical.
[0428] Embodiment 7. The composition of embodiment 4, wherein the first promoter and the second promoter are not identical.
[0429] Embodiment 8. The composition of any one of embodiments 4-7, wherein the eukaryotic cell is an animal cell.
[0430] Embodiment 9. The composition of embodiment 8, wherein the animal cell is a mammalian cell.
[0431] Embodiment 10. The composition of embodiment 9, wherein the animal cell is a human cell.
[0432] Embodiment 11. The composition of any one of embodiments 5-10, wherein the promoter is a constitutively active promoter.
[0433] Embodiment 12. The composition of any one of embodiments 5-11, wherein the promoter comprises a sequence isolated or derived from a promoter capable of driving expression of an RNA polymerase.
[0434] Embodiment 13. The composition of embodiment 12, wherein the promoter comprises a sequence isolated or derived from a U6 promoter.
[0435] Embodiment 14. The composition of any one of embodiments 5-12, wherein the promoter comprises a sequence isolated or derived from a promoter capable of driving expression of a transfer RNA (tRNA).
[0436] Embodiment 15. The composition of embodiment 14, wherein the promoter comprises a sequence isolated or derived from an alanine tRNA promoter, an arginine tRNA promoter, an asparagine tRNA promoter, an aspartic acid tRNA promoter, a cysteine tRNA promoter, a glutamine tRNA promoter, a glutamic acid tRNA promoter, a glycine tRNA promoter, a histidine tRNA promoter, an isoleucine tRNA promoter, a leucine tRNA promoter, a lysine tRNA promoter, a methionine tRNA promoter, a phenylalanine tRNA promoter, a proline tRNA promoter, a serine tRNA promoter, a threonine tRNA promoter, a tryptophan tRNA promoter, a tyrosine tRNA promoter, or a valine tRNA promoter.
[0437] Embodiment 16. The composition of embodiment 14, wherein the promoter comprises a sequence isolated or derived from a valine tRNA promoter.
[0438] Embodiment 17. The composition of any one of embodiments 2-16, wherein the sequence comprising the first gRNA further comprises a first spacer sequence that specifically binds to the first target RNA sequence.
[0439] Embodiment 18. The composition of embodiment 17, wherein the first spacer sequence has at least 50%, 55%, 60%, 65%, 70%, 75%, 80%, 87%, 90%, 95%, 97%, 99% or any percentage in between of complementarity to the first target RNA sequence.
[0440] Embodiment 19. The composition of embodiment 17, wherein the first spacer sequence has 100% complementarity to the target RNA sequence.
[0441] Embodiment 20. The composition of any one of embodiments 17-19, wherein the first spacer sequence comprises or consists of 20 nucleotides.
[0442] Embodiment 21. The composition of any one of embodiments 17-19, wherein the first spacer sequence comprises or consists of 21 nucleotides.
[0443] Embodiment 22. The composition of embodiment 21, wherein the first spacer sequence comprises or consists of 20 nucleotides of an amino acid sequence encoding a Beta-2-microglobulin β2M) protein.
[0444] Embodiment 23. The composition of embodiment 22, wherein the first spacer sequence comprises or consists of 20 nucleotides of an amino acid sequence of

(SEQ ID NO: 88)

MSRSVALAVL ALLSLSGLEA IQRTPKIQVY SRHPADIEVD
LLKNGERIEK VEHSDLSFSK DWSFYLLYYT EFTPTEKDEY
ACRVNHVTLS QPKIVKWDRD M.

[0445] Embodiment 24. The composition of any one of embodiments 2-23, wherein the sequence comprising the first gRNA further comprises a first scaffold sequence that specifically binds to the first RNA binding protein.
[0446] Embodiment 25. The composition of embodiment 24, wherein the first scaffold sequence comprises a stem-loop structure.
[0447] Embodiment 26. The composition of embodiment 24 or 25, wherein the scaffold sequence comprises or consists of 90 nucleotides.
[0448] Embodiment 27. The composition of embodiment 24 or 25, wherein the scaffold sequence comprises or consists of 93 nucleotides.
[0449] Embodiment 28. The composition of embodiment 27, wherein the scaffold sequence comprises the sequence

(SEQ ID NO: 12)

GUUUAAGAGCUAUGCUGGAAACAGCAUAGCAAGUUUAAAUAAGGCUAGU
CCGUUAUCAACUUGAAAAAGUGGCACCGAGUCGGUGCUUUUUUU
or

(SEQ ID NO: 13)

GUUUUAGAGCUAGAAAUAGCAAGUUAAAAUAAGGCUAGUCCGUUAUCAA
CUUGAAAAAGUGGCACCGAGUCGGUGCUUUUUUU.

[0450] Embodiment 29. The composition of any one of embodiments 1-28, wherein the sequence comprising the second gRNA further comprises a second spacer sequence that specifically binds to the second target RNA sequence.
[0451] Embodiment 30. The composition of embodiment 29, wherein the second spacer sequence has at least 50%, 55%, 60%, 65%, 70%, 75%, 80%, 87%, 90%, 95%, 97%, 99% or any percentage in between of complementarity to the first target RNA sequence.
[0452] Embodiment 31. The composition of embodiment 29, wherein the second spacer sequence has 100% complementarity to the target RNA sequence.
[0453] Embodiment 32. The composition of any one of embodiments 29-31, wherein the second spacer sequence comprises or consists of 20 nucleotides.
[0454] Embodiment 33. The composition of any one of embodiments 29-31, wherein the second spacer sequence comprises or consists of 21 nucleotides.
[0455] Embodiment 34. The composition of any one of embodiments 2-34, wherein the second spacer sequence comprises or further comprises a sequence comprising at least 1, 2, 3, 4, 5, 6, or 7 repeats of the sequence CUG (SEQ ID NO: 18), CCUG (SEQ ID NO: 19), CAG (SEQ ID NO: 80), GGGGCC (SEQ ID NO: 81) or any combination thereof.
[0456] Embodiment 35. The composition of any one of embodiments 2-34, wherein the sequence comprising the second gRNA further comprises a second scaffold sequence that specifically binds to the first RNA binding protein.
[0457] Embodiment 36. The composition of embodiment 35, wherein the second scaffold sequence comprises a stem-loop structure.
[0458] Embodiment 37. The composition of embodiment 35 or 36, wherein the second scaffold sequence comprises or consists of 85 nucleotides.
[0459] Embodiment 38. The composition of embodiment 37, wherein the second scaffold sequence comprises the sequence

(SEQ ID NO: 12)

GUUUAAGAGCUAUGCUGGAAACAGCAUAGCAAGUUUAAAUAAGGCUAGU
CCGUUAUCAACUUGAAAAAGUGGCACCGAGUCGGUGCUUUUUUU
or

(SEQ ID NO: 13)

GUUUUAGAGCUAGAAAUAGCAAGUUAAAAUAAGGCUAGUCCGUUAUCAA
CUUGAAAAAGUGGCACCGAGUCGGUGCUUUUUUU.

[0460] Embodiment 39. The composition of embodiment 1, wherein the gRNA does not bind or does not selectively bind to a second sequence within the RNA molecule.
[0461] Embodiment 40. The composition of any one of embodiments 2-38, wherein the first gRNA does not bind or does not selectively bind to a second sequence within the first RNA molecule.
[0462] Embodiment 41. The composition of any one of embodiments 2-38, wherein the second gRNA does not bind or does not selectively bind to a second sequence within the second RNA molecule.
[0463] Embodiment 42. The composition of embodiment 39, wherein an RNA genome or an RNA transcriptome comprises the RNA molecule.
[0464] Embodiment 43. The composition of embodiment 40 or 41, wherein an RNA genome or an RNA transcriptome comprises the first RNA molecule or the second RNA molecule.
[0465] Embodiment 44. The composition of any one of embodiments 1-43, wherein the first RNA binding protein comprises a CRISPR-Cas protein.
[0466] Embodiment 45. The composition of embodiment 44, wherein the CRISPR-Cas protein is a Type II CRISPR-Cas protein.
[0467] Embodiment 46. The composition of embodiment 45, wherein the first RNA binding protein comprises a Cas9 polypeptide or an RNA-binding portion thereof.
[0468] Embodiment 47. The composition of embodiment 44, wherein the CRISPR-Cas protein is a Type V CRISPR-Cas protein.
[0469] Embodiment 48. The composition of embodiment 47, wherein the first RNA binding protein comprises a Cpf1 polypeptide or an RNA-binding portion thereof.
[0470] Embodiment 49. The composition of embodiment 44, wherein the CRISPR-Cas protein is a Type VI CRISPR-Cas protein.
[0471] Embodiment 50. The composition of embodiment 49, wherein the first RNA binding protein comprises a Cas13 polypeptide or an RNA-binding portion thereof.
[0472] Embodiment 51. The composition of any one of embodiments 44-50, wherein the CRISPR-Cas protein comprises a native RNA nuclease activity.
[0473] Embodiment 52. The composition of embodiment 51, wherein the native RNA nuclease activity is reduced or inhibited.
[0474] Embodiment 53. The composition of embodiment 52, wherein the native RNA nuclease activity is increased or induced.
[0475] Embodiment 54. The composition of any one of embodiments 44-53, wherein the CRISPR-Cas protein comprises a native DNA nuclease activity and wherein the native DNA nuclease activity is inhibited.
[0476] Embodiment 55. The composition of embodiment 54, wherein the CRISPR-Cas protein comprises a mutation.
[0477] Embodiment 56. The composition of embodiment 54 or 55, wherein a nuclease domain of the CRISPR-Cas protein comprises the mutation.
[0478] Embodiment 57. The composition of any one of embodiments 54-56, wherein the mutation occurs in a nucleic acid encoding the CRISPR-Cas protein.
[0479] Embodiment 58. The composition of any one of embodiments 54-56, wherein the mutation occurs in an amino acid encoding the CRISPR-Cas protein.
[0480] Embodiment 59. The composition of any one of embodiments 54-58, wherein the mutation comprises a substitution, an insertion, a deletion, a frameshift, an inversion, or a transposition.
[0481] Embodiment 60. The composition of embodiment 59, wherein the mutation comprises a deletion of a nuclease domain, a binding site within the nuclease domain, an active site within the nuclease domain, or at least one essential amino acid residue within the nuclease domain.
[0482] Embodiment 61. The composition of any one of embodiments 1-43, wherein the first RNA binding protein comprises a Pumilio and FBF (PUF) protein.
[0483] Embodiment 62. The composition of embodiment 61, wherein the first RNA binding protein comprises a Pumilio-based assembly (PUMBY) protein.
[0484] Embodiment 63. The composition of any one of embodiments 1-56, wherein the first RNA binding protein does not require multimerization for RNA-binding activity.
[0485] Embodiment 64. The composition of embodiment 63, wherein the first RNA binding protein is not a monomer of a multimer complex
[0486] Embodiment 65. The composition of embodiment 63, wherein a multimer protein complex does not comprise the first RNA binding protein.
[0487] Embodiment 66. The composition of any one of embodiments 1-65, wherein the first RNA binding protein selectively binds to a target sequence within the RNA molecule.
[0488] Embodiment 67. The composition of embodiment 66, wherein the first RNA binding protein does not comprise an affinity for a second sequence within the RNA molecule.
[0489] Embodiment 68. The composition of embodiment 66 or 67, wherein the first RNA binding protein does not comprise a high affinity for or selectively bind a second sequence within the RNA molecule.
[0490] Embodiment 69. The composition of embodiment 68, wherein an RNA genome or an RNA transcriptome comprises the RNA molecule.
[0491] Embodiment 70. The composition of any one of embodiments 1-69, wherein the first RNA binding protein comprises between 2 and 1300 amino acids, inclusive of the endpoints.
[0492] Embodiment 71. The composition of any one of embodiments 1-70, wherein the sequence encoding the first RNA binding protein further comprises a nuclear localization signal (NLS).
[0493] Embodiment 72. The composition of embodiment 71, wherein the sequence encoding a nuclear localization signal (NLS) is positioned 3′ to the sequence encoding the first RNA binding protein.
[0494] Embodiment 73. The composition of embodiment 72, wherein the first RNA binding protein comprises an NLS at a C-terminus of the protein.
[0495] Embodiment 74. The composition of any one of embodiments 1-70, wherein the sequence encoding the first RNA binding protein further comprises a first sequence encoding a first NLS and a second sequence encoding a second NLS.
[0496] Embodiment 75. The composition of embodiment 74, wherein the sequence encoding the first NLS or the second NLS is positioned 3′ to the sequence encoding the first RNA binding protein.
[0497] Embodiment 76. The composition of embodiment 75, wherein the first RNA binding protein comprises the first NLS or the second NLS at a C-terminus of the protein.
[0498] Embodiment 77. The composition of any one of embodiments 1-76, wherein the second RNA binding protein comprises or consists of a nuclease domain.
[0499] Embodiment 78. The composition of embodiment 77, wherein the second RNA binding protein comprises or consists of an RNAse.
[0500] Embodiment 79. The composition of embodiment 78, wherein the second RNA binding protein comprises or consists of an RNAse1.
[0501] Embodiment 80. The composition of embodiment 79, wherein the RNAse1 protein comprises or consists of SEQ ID NO: 20.
[0502] Embodiment 81. The composition of embodiment 78, wherein the second RNA binding protein comprises or consists of an RNAse4.
[0503] Embodiment 82. The composition of embodiment 81, wherein the RNAse4 protein comprises or consists of SEQ ID NO: 21.
[0504] Embodiment 83. The composition of embodiment 78, wherein the second RNA binding protein comprises or consists of an RNAse6.
[0505] Embodiment 84. The composition of embodiment 83, wherein the RNAse6 protein comprises or consists of SEQ ID NO: 22.
[0506] Embodiment 85. The composition of embodiment 78, wherein the second RNA binding protein comprises or consists of an RNAse7.
[0507] Embodiment 86. The composition of embodiment 85, wherein the RNAse7 protein comprises or consists of SEQ ID NO: 23.
[0508] Embodiment 87. The composition of embodiment 78, wherein the second RNA binding protein comprises or consists of an RNAse8.
[0509] Embodiment 88. The composition of embodiment 87, wherein the RNAse8 protein comprises or consists of SEQ ID NO: 24.
[0510] Embodiment 89. The composition of embodiment 88, wherein the second RNA binding protein comprises or consists of an RNAse2.
[0511] Embodiment 90. The composition of embodiment 89, wherein the RNAse2 protein comprises or consists of SEQ ID NO: 25.
[0512] Embodiment 91. The composition of embodiment 78, wherein the second RNA binding protein comprises or consists of an RNAse6PL.
[0513] Embodiment 92. The composition of embodiment 91, wherein the RNAse6PL protein comprises or consists of SEQ ID NO: 26.
[0514] Embodiment 93. The composition of embodiment 78, wherein the second RNA binding protein comprises or consists of an RNAseL.
[0515] Embodiment 94. The composition of embodiment 93, wherein the RNAseL protein comprises or consists of SEQ ID NO: 27.
[0516] Embodiment 95. The composition of embodiment 78, wherein the second RNA binding protein comprises or consists of an RNAseT2.
[0517] Embodiment 96. The composition of embodiment 95, wherein the RNAseT2 protein comprises or consists of SEQ ID NO: 28.
[0518] Embodiment 97. The composition of embodiment 78, wherein the second RNA binding protein comprises or consists of an RNAse11.
[0519] Embodiment 98. The composition of embodiment 97, wherein the RNAse11 protein comprises or consists of SEQ ID NO: 29.
[0520] Embodiment 99. The composition of embodiment 78, wherein the second RNA binding protein comprises or consists of an RNAseT2-like.
[0521] Embodiment 100. The composition of embodiment 99, wherein the RNAseT2-like protein comprises or consists of SEQ ID NO: 30.
[0522] Embodiment 101. The composition of embodiment 77, wherein the second RNA binding protein comprises or consists of a NOB1 polypeptide.
[0523] Embodiment 102. The composition of embodiment 101, wherein the NOB1 polypeptide comprises or consists of SEQ ID NO: 31.
[0524] Embodiment 103. The composition of embodiment 77, wherein the second RNA binding protein comprises or consists of an endonuclease.
[0525] Embodiment 104. The composition of embodiment 103, wherein the second RNA binding protein comprises or consists of an endonuclease V (ENDOV) polypeptide.
[0526] Embodiment 105. The composition of embodiment 104, wherein the ENDOV protein comprises or consists of SEQ ID NO: 32.
[0527] Embodiment 106. The composition of embodiment 103, wherein the second RNA binding protein comprises or consists of an endonuclease G (ENDOG).
[0528] Embodiment 107. The composition of embodiment 106, wherein the ENDOG protein comprises or consists of SEQ ID NO: 33.
[0529] Embodiment 108. The composition of embodiment 103, wherein the second RNA binding protein comprises or consists of an endonuclease D1 (ENDOD1) polypeptide.
[0530] Embodiment 109. The composition of embodiment 108, wherein the ENDOD1 comprises or consists of SEQ ID NO: 34.
[0531] Embodiment 110. The composition of embodiment 77, wherein the second RNA binding protein comprises or consists of a Human flap endonuclease-1 (hFEN1) polypeptide.
[0532] Embodiment 111. The composition of embodiment 110, wherein the hFEN1 protein comprises or consists of SEQ ID NO: 35.
[0533] Embodiment 112. The composition of embodiment 77, wherein the second RNA binding protein comprises or consists of a human Schlafen 14 (hSLFN14) polypeptide.
[0534] Embodiment 113. The composition of embodiment 112, wherein the hSLFN14 polypeptide comprises or consists of SEQ ID NO: 36.
[0535] Embodiment 114. The composition of embodiment 77, wherein the second RNA binding protein comprises or consists of a human beta-lactamase-like protein 2 (hLACTB2) polypeptide.
[0536] Embodiment 115. The composition of embodiment 114, wherein the hLACTB2 polypeptide comprises or consists of SEQ ID NO: 37.
[0537] Embodiment 116. The composition of embodiment 77, wherein the second RNA binding protein comprises or consists of an apurinic/apyrimidinic (AP) endodeoxyribonuclease (APEX2) polypeptide.
[0538] Embodiment 117. The composition of embodiment 116, wherein the APEX2 polypeptide comprises or consists of SEQ ID NO: 38.
[0539] Embodiment 118. The composition of embodiment 116, wherein the APEX2 polypeptide comprises or consists of SEQ ID NO: 39.
[0540] Embodiment 119. The composition of embodiment 77, wherein the second RNA binding protein comprises or consists of an angiogenin (ANG) polypeptide.
[0541] Embodiment 120. The composition of embodiment 119, wherein the ANG polypeptide comprises or consists of SEQ ID NO: 40.
[0542] Embodiment 121. The composition of embodiment 77, wherein the second RNA binding protein comprises or consists of a heat responsive protein 12 (HRSP12) polypeptide.
[0543] Embodiment 122. The composition of embodiment 121, wherein the HRSP12 polypeptide comprises or consists of SEQ ID NO: 41.
[0544] Embodiment 123. The composition of embodiment 77, wherein the second RNA binding protein comprises or consists of a Zinc Finger CCCH-Type Containing 12A (ZC3H12A) polypeptide.
[0545] Embodiment 124. The composition of embodiment 123, wherein the ZC3H12A polypeptide comprises or consists of SEQ ID NO: 42.
[0546] Embodiment 125. The composition of embodiment 124, wherein the ZC3H12A polypeptide comprises or consists of SEQ ID NO: 43.
[0547] Embodiment 126. The composition of embodiment 77, wherein the second RNA binding protein comprises or consists of a Reactive Intermediate Imine Deaminase A (RIDA) polypeptide.
[0548] Embodiment 127. The composition of embodiment 126, wherein the RIDA polypeptide comprises or consists of SEQ ID NO: 44.
[0549] Embodiment 128. The composition of embodiment 77, wherein the second RNA binding protein comprises or consists of a Phospholipase D Family Member 6 (PDL6) polypeptide.
[0550] Embodiment 129. The composition of embodiment 128, wherein the PDL6 polypeptide comprises or consists of SEQ ID NO: 126.
[0551] Embodiment 130. The composition of embodiment 77, wherein the second RNA binding protein comprises or consists of a Endonuclease III-like protein 1 (NTHL) polypeptide.
[0552] Embodiment 131. The composition of embodiment 130, wherein the NTHL polypeptide comprises or consists of SEQ ID NO: 123.
[0553] Embodiment 132. The composition of embodiment 77, wherein the second RNA binding protein comprises or consists of a Mitochondrial ribonuclease P catalytic subunit (KIAA0391) polypeptide.
[0554] Embodiment 133. The composition of embodiment 132, wherein the KIAA0391 polypeptide comprises or consists of SEQ ID NO: 127.
[0555] Embodiment 134. The composition of embodiment 77, wherein the second RNA binding protein comprises or consists of an apurinic or apyrimidinic site lyase (APEX1) polypeptide.
[0556] Embodiment 135. The composition of embodiment 134, wherein the APEX1 polypeptide comprises or consists of SEQ ID NO: 125.
[0557] Embodiment 136. The composition of embodiment 77, wherein the second RNA binding protein comprises or consists of an argonaute 2 (AGO2) polypeptide.
[0558] Embodiment 137. The composition of embodiment 136, wherein the AGO2 polypeptide comprises or consists of SEQ ID NO: 128.
[0559] Embodiment 138. The composition of embodiment 67, wherein the second RNA binding protein comprises or consists of a mitochondrial nuclease EXOG (EXOG) polypeptide.
[0560] Embodiment 139. The composition of embodiment 138, wherein the EXOG polypeptide comprises or consists of SEQ ID NO: 129.
[0561] Embodiment 140. The composition of embodiment 77, wherein the second RNA binding protein comprises or consists of a Zinc Finger CCCH-Type Containing 12D (ZC3H12D) polypeptide.
[0562] Embodiment 141. The composition of embodiment 140, wherein the ZC3H12D polypeptide comprises or consists of SEQ ID NO: 130.
[0563] Embodiment 142. The composition of embodiment 77, wherein the second RNA binding protein comprises or consists of an endoplasmic reticulum to nucleus signaling 2 (ERN2) polypeptide.
[0564] Embodiment 143. The composition of embodiment 142, wherein the ERN2 polypeptide comprises or consists of SEQ ID NO: 131.
[0565] Embodiment 144. The composition of embodiment 77, wherein the second RNA binding protein comprises or consists of a pelota mRNA surveillance and ribosome rescue factor (PELO) polypeptide.
[0566] Embodiment 145. The composition of embodiment 144, wherein the PELO polypeptide comprises or consists of SEQ ID NO: 132.
[0567] Embodiment 146. The composition of embodiment 77, wherein the second RNA binding protein comprises or consists of a YBEY metallopeptidase (YBEY) polypeptide.
[0568] Embodiment 147. The composition of embodiment 146, wherein the YBEY polypeptide comprises or consists of SEQ ID NO: 133.
[0569] Embodiment 148. The composition of embodiment 77, wherein the second RNA binding protein comprises or consists of a cleavage and polyadenylation specific factor 4 like (CPSF4L) polypeptide.
[0570] Embodiment 149. The composition of embodiment 148, wherein the CPSF4L polypeptide comprises or consists of SEQ ID NO: 134.
[0571] Embodiment 150. The composition of embodiment 77, wherein the second RNA binding protein comprises or consists of an hCG_2002731polypeptide.
[0572] Embodiment 151. The composition of embodiment 150, wherein the hCG_2002731 polypeptide comprises or consists of SEQ ID NO: 135.
[0573] Embodiment 152. The composition of embodiment 150, wherein the hCG_2002731 polypeptide comprises or consists of SEQ ID NO: 136.
[0574] Embodiment 153. The composition of embodiment 77, wherein the second RNA binding protein comprises or consists of an Excision Repair Cross-Complementation Group 1 (ERCC1) polypeptide.
[0575] Embodiment 154. The composition of embodiment 153, wherein the ERCC1 polypeptide comprises or consists of SEQ ID NO: 137.
[0576] Embodiment 155. The composition of embodiment 77, wherein the second RNA binding protein comprises or consists of a ras-related C3 botulinum toxin substrate 1 isoform (RAC1) polypeptide.
[0577] Embodiment 156. The composition of embodiment 155, wherein the RAC1 polypeptide comprises or consists of SEQ ID NO: 138.
[0578] Embodiment 157. The composition of embodiment 77, wherein the second RNA binding protein comprises or consists of a Ribonuclease A A1 (RAA1) polypeptide.
[0579] Embodiment 158. The composition of embodiment 157, wherein the RAA1 polypeptide comprises or consists of SEQ ID NO: 139.
[0580] Embodiment 159. The composition of embodiment 77, wherein the second RNA binding protein comprises or consists of a Ras Related Protein (RAB1) polypeptide.
[0581] Embodiment 160. The composition of embodiment 159, wherein the RAB1 polypeptide comprises or consists of SEQ ID NO: 140.
[0582] Embodiment 161. The composition of embodiment 77, wherein the second RNA binding protein comprises or consists of a DNA Replication Helicase/Nuclease 2 (DNA2) polypeptide.
[0583] Embodiment 162. The composition of embodiment 161, wherein the DNA2 polypeptide comprises or consists of SEQ ID NO: 141.
[0584] Embodiment 163. The composition of embodiment 77, wherein the second RNA binding protein comprises or consists of a FLJ35220 polypeptide.
[0585] Embodiment 164. The composition of embodiment 163, wherein the F1135220 polypeptide comprises or consists o SEQ ID NO: 142.
[0586] Embodiment 165. The composition of embodiment 77, wherein the second RNA binding protein comprises or consists of a FLJ13173 polypeptide.
[0587] Embodiment 166. The composition of embodiment 165, wherein the FLJ13173 polypeptide comprises or consists of SEQ ID NO: 143.
[0588] Embodiment 167. The composition of embodiment 77, wherein the second RNA binding protein comprises or consists of a DNA repair endonuclease XPF (ERCC4) polypeptide.
[0589] Embodiment 168. The composition of embodiment 167, wherein the ERCC4 polypeptide comprises or consists of SEQ ID NO: 124.
[0590] Embodiment 169. The composition of embodiment 77, wherein the second RNA binding protein comprises or consists of a mutated Rnase1 (Rnase1(K41R)) polypeptide.
[0591] Embodiment 170. The composition of embodiment 169, wherein the Rnase1(K41R) polypeptide comprises or consists of SEQ ID NO: 116.
[0592] Embodiment 171. The composition of embodiment 77, wherein the second RNA binding protein comprises or consists of a mutated Rnase1 (Rnase1(K41R, D121E)) polypeptide.
[0593] Embodiment 172. The composition of embodiment 171, wherein the Rnase1 (Rnase1(K41R, D121E)) polypeptide comprises or consists of SEQ ID NO: 117.
[0594] Embodiment 173. The composition of embodiment 77, wherein the second RNA binding protein comprises or consists of a mutated Rnase1 (Rnase1(K41R, D121E, H119N)) polypeptide.
[0595] Embodiment 174. The composition of embodiment 173, wherein the Rnase1 (Rnase1(K41R, D121E, H119N)) polypeptide comprises or consists of SEQ ID NO: 118.
[0596] Embodiment 175. The composition of embodiment 77, wherein the second RNA binding protein comprises or consists of a mutated Rnase1 (Rnase1(H119N)) polypeptide.
[0597] Embodiment 166. The composition of embodiment 175, wherein the Rnase1 (Rnase1(H119N)) polypeptide comprises or consists of SEQ ID NO: 119.
[0598] Embodiment 177. The composition of embodiment 77, wherein the second RNA binding protein comprises or consists of a mutated Rnase1 (Rnase1(R39D, N67D, N88A, G89D, R91D, H119N)) polypeptide.
[0599] Embodiment 178. The composition of embodiment 177, wherein the Rnase1 (Rnase1(R39D, N67D, N88A, G89D, R91D, H119N)) polypeptide comprises or consists of SEQ ID NO: 120.
[0600] Embodiment 179. The composition of embodiment 77, wherein the second RNA binding protein comprises or consists of a mutated Rnase1 (Rnase1(R39D, N67D, N88A, G89D, R91D, H119N)) polypeptide.
[0601] Embodiment 180. The composition of embodiment 179, wherein the Rnase1 (Rnase1(R39D, N67D, N88A, G89D, R91D, H119N, K41R, D121E)) polypeptide comprises or consists of SEQ ID NO: 121.
[0602] Embodiment 181. The composition of embodiment 77, wherein the second RNA binding protein comprises or consists of a mutated Rnase1 (Rnase1(R39D, N67D, N88A, G89D, R91D, H119N)) polypeptide.
[0603] Embodiment 182. The composition of embodiment 181, wherein the Rnase1 (Rnase1(R39D, N67D, N88A, G89D, R91D)) polypeptide comprises or consists of SEQ ID NO: 122.
[0604] Embodiment 183. The composition of embodiment 77, wherein the second RNA binding protein comprises or consists of Teneurin Transmembrane Protein 1 (TENM1) polypeptide.
[0605] Embodiment 184. The composition of embodiment 173, wherein the TENM1 polypeptide comprises or consists of SEQ ID NO: 144.
[0606] Embodiment 185. The composition of embodiment 77, wherein the second RNA binding protein comprises or consists of Teneurin Transmembrane Protein 2 (TENM2) polypeptide.
[0607] Embodiment 186. The composition of embodiment 185, wherein the TENM2 polypeptide comprises or consists of SEQ ID NO: 145.
[0608] Embodiment 187. The composition of any one of embodiments 1-77, wherein the second RNA binding protein comprises or consists of a transcription activator-like effector nuclease (TALEN) polypeptide or a nuclease domain thereof.
[0609] Embodiment 188. The composition of embodiment 187, wherein the TALEN polypeptide comprises or consists of:

| (SEQ ID NO: 205) | |
|---|---|
| 1 | MRIGKSSGWL NESVSLEYEH VSPPTRPRDT RRRPRAAGDG GLAHLHRRLA VGYAEDTPRT |
| 61 | EARSPAPRRP LPVAPASAPP APSLVPEPPM PVSLPAVSSP RFSAGSSAAI TDPFPSLPPT |
| 121 | PVLYAMAREL EALSDATWQP AVPLPAEPPT DARRGNTVFD EASASSPVIA SACPQAFASP |
| 181 | PRAPRSARAR RARTGGDAWP APTFLSRPSS SRIGRDVFGK LVALGYSREQ IRKLKQESLS |
| 241 | EIAKYHTTLT GQGFTHADIC RISRRRQSLR VVARNYPELA AALPELTRAH IVDIARQRSG |
| 301 | DLALQALLPV ATALTAAPLR LSASQIATVA QYGERPAIQA LYRLRRKLTR APLHLTPQQV |
| 361 | VAIASNTGGK RALEAVCVQL PVLRAAPYRL STEQVVAIAS NKGGKQALEA VKAHLLDLLG |
| 421 | APYVLDTEQV VAIASHNGGK QALEAVKADL LDLRGAPYAL STEQVVAIAS HNGGKQALEA |
| 481 | VKADLLELRG APYALSTEQV VAIASHNGGK QALEAVKAHL LDLRGVPYAL STEQVVAIAS |
| 541 | HNGGKQALEA VKAQLLDLRG APYALSTAQV VAIASNGGGK QALEGIGEQL LKLRTAPYGL |
| 601 | STEQVVAIAS HDGGKQALEA VGAQLVALRA APYALSTEQV VAIASNKGGK QALEAVKAQL |
| 661 | LELRGAPYAL STAQVVAIAS HDGGNQALEA VGTQLVALRA APYALSTEQV VAIASHDGGK |
| 721 | QALEAVGAQL VALRAAPYAL NTEQVVAIAS SHGGKQALEA VRALFPDLRA APYALSTAQL |
| 781 | VAIASNPGGK QALEAVRALF RELRAAPYAL STEQVVAIAS NHGGKQALEA VRALFRGLRA |
| 841 | APYGLSTAQV VAIASSNGGK QALEAVWALL PVLRATPYDL NTAQIVAIAS HDGGKPALEA |
| 901 | VWAKLPVLRG APYALSTAQV VAIACISGQQ ALEAIEAHMP TLRQASHSLS PERVAAIACI |
| 961 | GGRSAVEAVR QGLPVKAIRR IRREKAPVAG PPPASLGPTP QELVAVLHFF RAHQQPRQAF |
| 1021 | VDALAAFQAT RPALLRLLSS VGVTEIEALG GTIPDATERW QRLLGRLGFR PATGAAAPSP |
| 1081 | DSLQGFAQSL ERTLGSPGMA GQSACSPHRK RPAETAIAPR SIRRSPNNAG QPSEPWPDQL |
| 1141 | AWLQRRKRTA RSHIRADSAA SVPANLHLGT RAQFTPDRLR AEPGPIMQAH TSPASVSFGS |
| 1201 | HVAFEPGLPD PGTPTSADLA SFEAEPFGVG PLDFHLDWLL QILET. |

[0610] Embodiment 189. The composition of embodiment 187, wherein the TALEN polypeptide comprises or consists of:

| (SEQ ID NO: 206) | |
|---|---|
| 1 | mdpirsrtps parellpgpq pdrvqptadr ggappaggpl dglparrtms rtrlpsppap |
| 61 | spafsagsfs dllrqfdpsl ldtslldsmp avgtphtaaa paecdevqsg lraaddpppt |
| 121 | vrvavtaarp prakpaprrr aaqpsdaspa aqvdlrtlgy sqqqqekikp kvgstvaqhh |
| 181 | ealvghgfth ahivalsrhp aalgtvavky qdmiaalpea thedivgvgk qwsgaralea |
| 241 | lltvagelrg pplqldtgql vkiakrggvt aveavhasrn altgaplnlt paqvvaiasn |
| 301 | nggkqaletv qrllpvlcqa hgltpaqvva iashdggkqa letmqrllpv lcqahglppd |
| 361 | qvvaiasnig gkqaletvqr llpvlcqahg ltpdqvvaia shgggkqale tvqrllpvlc |
| 421 | qahgltpdqv vaiashdggk qaletvqrll pvlcqahglt pdqvvaiasn gggkqaletv |
| 481 | qrllpvlcqa hgltpdqvva iasnggkqal etvqrllpvl cqahgltpdq vvaiashdgg |
| 541 | kqaletvqrl lpvlcqthgl tpaqvvaias hdggkqalet vqqllpvlcq ahgltpdqvv |
| 601 | aiasniggkq alatvqrllp vlcqahgltp dqvvaiasng ggkqaletvq rllpvlcqah |
| 661 | gltpdqvvai asngggkqal etvqrllpvl cqahgltqvq vvaiasnigg kqaletvqrl |
| 721 | lpvlcqahgl tpaqvvaias hdggkqalet vqrllpvlcq ahgltpdqvv aiasngggkq |
| 781 | aletvqrllp vlcqahgltq eqvvaiasnn ggkqaletvq rllpvlcqah gltpdqvvai |
| 841 | asngggkqal etvqrllpvl cqahgltpaq vvaiasnigg kqaletvqrl lpvlcqdhgl |
| 901 | tlaqvvaias niggkqalet vqrllpvlcq ahgltqdqvv aiasniggkq aletvqrllp |
| 961 | vlcqdhgltp dqvvaiasni ggkqaletvq rllpvlcqdh gltldqvvai asnggkqale |
| 1021 | tvqrllpvlc qdhgltpdqv vaiasnsggk qaletvqrll pvlcqdhglt pnqvvaiasn |
| 1081 | ggkqalesiv aqlsrpdpal aaltndhlva laclggrpam davkkglpha pelirrvnrr |
| 1141 | igertshrva dyaqvvrvle ffqchshpay afdeamtqfg msrnglvqlf rrvgvtelea |
| 1201 | rggtlppasq rwdrilqasg mkrakpspts aqtpdqaslh afadslerdl dapspmhegd |
| 1261 | qtgassrkrs rsdravtgps aqhsfevrvp eqrdalhlpl swrvkrprtr iggglpdpgt |
| 1321 | piaadlaass tvmweqdaap fagaaddfpa fneeelawlm ellpqsgsvg gti. |

[0611] Embodiment 190. The composition of any one of embodiments 1-77, wherein the second RNA binding protein comprises or consists of a zinc finger nuclease polypeptide or a nuclease domain thereof.
[0612] Embodiment 191. The composition of embodiment 190, wherein the zinc finger nuclease polypeptide comprises or consists of:

| (SEQ ID NO: 207) | |
|---|---|
| 1 | MSRPRFNPRG DFPLQRPRAP NPSGMRPPGP FMRPGSMGLP RFYPAGRARG IPHRFAGHES |
| 61 | YQNMGPQRMN VQVTQHRTDP RLTKEKLDFH EAQQKKGKPH GSRWDDEPHI SASVAVKQSS |
| 121 | VTQVTEQSPK VQSRYTKESA SSILASFGLS NEDLEELSRY PDEQLTPENM PLILRDIRMR |
| 181 | KMGRRLPNLP SQSRNKETLG SEAVSSNVID YGHASKYGYT EDPLEVRIYD PEIPTDEVEN |
| 241 | EFQSQQNISA SVPNPNVICN SMFPVEDVFR QMDFPGESSN NRSFFSVESG TKMSGLHISG |
| 301 | GQSVLEPIKS VNQSINQTVS QTMSQSLIPP SMNQQPFSSE LISSVSQQER IPHEPVINSS |
| 361 | NVHVGSRGSK KNYQSQADIP IRSPFGIVKA SWLPKFSHAD AQKMKRLPTP SMMNDYYAAS |
| 421 | PRIFPHLCSL CNVECSHLKD WIQHQNTSTH IESCRQLRQQ YPDWNPEILP SRRNEGNRKE |
| 481 | NETPRRRSHS PSPRRSRRSS SSHRFRRSRS PMHYMYRPRS RSPRICHRFI SRYRSRSRSR |
| 541 | SPYRIRNPFR GSPKCFRSVS PERMSRRSVR SSDRKKALED VVQRSGHGTE FNKQKHLEAA |
| 601 | DKGHSPAQKP KTSSGTKPSV KPTSATKSDS NLGGHSIRCK SKNLEDDTLS ECKQVSDKAV |
| 661 | SLQRKLRKEQ SLHYGSVLLI TELPEDGCTE EDVRKLFQPF GKVNDVLIVP YRKEAYLEME |
| 721 | FKEAITAIMK YIETTPLTIK GKSVKICVPG KKKAQNKEVK KKTLESKKVS ASTLKRDADA |
| 781 | SKAVEIVTST SAAKTGQAKA SVAKVNKSTG KSASSVKSVV TVAVKGNKAS IKTAKSGGKK |
| 841 | SLEAKKTGNV KNKDSNKPVT IPENSEIKTS IEVKATENCA KEAISDAALE ATENEPLNKE |
| 901 | TEEMCVMLVS NLPNKGYSVE EVYDLAKPFG GLKDILILSS HKKAYIEINR KAAESMVKFY |
| 961 | TCFPVLMDGN QLSISMAPEN MNIKDEEAIF ITLVKENDPE ANIDTIYDRF VHLDNLPEDG |
| 1021 | LQCVLCVGLQ FGKVDHHVFI SNRNKAILQL DSPESAQSMY SFLKQNPQNI GDHMLTCSLS |
| 1081 | PKIDLPEVQI EHDPELEKES PGLKNSPIDE SEVQTATDSP SVKPNELEEE STPSIQTETL |
| 1141 | VQQEEPCEEE AEKATCDSDF AVETLELETQ GEEVKEEIPL VASASVSIEQ FTENAEECAL |
| 1201 | NQQMFNSDLE KKGAEIINPK TALLPSDSVF AEERNLKGIL EESPSEAEDF ISGITQTMVE |
| 1261 | AVAEVEKNET VSEILPSTCI VTLVPGIPTG DEKTVDKKNI SEKKGNMDEK EEKEFNTKET |
| 1321 | RMDLQIGTEK AEKNEGRMDA EKVEKMAAMK EKPAENTLFK AYPNKGVGQA NKPDETSKTS |
| 1381 | ILAVSDVSSS KPSIKAVIVS SPKAKATVSK TENQKSFPKS VPRDQINAEK KLSAKEFGLL |
| 1441 | KPTSARSGLA ESSSKFKPTQ SSLTRGGSGR ISALQGKLSK LDYRDITKQS QETEARPSIM |
| 1501 | KRDDSNNKTL AEQNTKNPKS TTGRSSKSKE EPLFPFNLDE FVTVDEVIEE VNPSQAKQNP |
| 1561 | LKGKRKETLK NVPFSELNLK KKKGKTSTPR GVEGELSFVT LDEIGEEEDA AAHLAQALVT |
| 1621 | VDEVIDEEEL NMEEMVKNSN SLFTLDELID QDDCISHSEP KDVTVLSVAE EQDLLKQERL |
| 1681 | VTVDEIGEVE ELPLNESADI TFATLNTKGN EGDTVRDSIG FISSQVPEDP STLVTVDEIQ |
| 1741 | DDSSDLHLVT LDEVTEEDED SLADFNNLKE ELNFVTVDEV GEEEDGDNDL KVELAQSKND |
| 1801 | HPTDKKGNRK KRAVDTKKTK LESLSQVGPV NENVMEEDLK TMIERHLTAK TPTKRVRIGK |
| 1861 | TLPSEKAVVT EPAKGEEAFQ MSEVDEESGL KDSEPERKRK KTEDSSSGKS VASDVPEELD |
| 1921 | FLVPKAGFFC PICSLFYSGE KAMTNHCKST RHKQNTEKFM AKQRKEKEQN EAEERSSR. |

[0613] Embodiment 192. The composition of any one of embodiments 1-191, wherein the composition further comprises (a) a sequence comprising a gRNA that specifically binds within an RNA molecule and

[0614] (b) a sequence encoding a nuclease.
[0615] Embodiment 193. The composition of embodiment 192, wherein the nuclease comprises a sequence isolated or derived from a CRISPR/Cas protein.
[0616] Embodiment 194. The composition of embodiment 193, wherein the CRISPR/Cas protein is isolated or derived from any one of a type I, a type IA, a type IB, a type IC, a type ID, a type IE, a type IF, a type IU, a type III, a type IIIA, a type IIIB, a type IIIC, a type IIID, a type IV, a type IVA, a type IVB, a type II, a type IIA, a type IIB, a type ITC, a type V, or a type VI CRISPR/Cas protein.
[0617] Embodiment 195. The composition of embodiment 192, wherein the nuclease comprises a sequence isolated or derived from a TALEN or a nuclease domain thereof.
[0618] Embodiment 196. The composition of embodiment 192, wherein the nuclease comprises a sequence isolated or derived from a zinc finger nuclease or a nuclease domain thereof.
[0619] Embodiment 197. The composition of any one of embodiments 191-196, wherein the target sequence comprises a sequence encoding a component of an adaptive immune response.
[0620] Embodiment 198. A vector comprising the composition of any one of embodiments 1-197.
[0621] Embodiment 199. The vector of embodiment 198, wherein the vector is a viral vector.
[0622] Embodiment 200. The vector of embodiment 199, wherein the vector comprises a sequence isolated or derived from a lentivirus, an adenovirus, an adeno-associated virus (AAV) vector, or a retrovirus.
[0623] Embodiment 201. The vector of embodiment 199 or 200, wherein the vector is replication incompetent.
[0624] Embodiment 202. The vector of embodiment any one of embodiments 100-201, wherein the vector comprises a sequence isolated or derived from an adeno-associated vector (AAV).
[0625] Embodiment 203. The vector of embodiment 202, wherein the adeno-associated virus (AAV) is an isolated AAV.
[0626] Embodiment 204. The vector of embodiment 202 or 203, wherein the adeno-associated virus (AAV) is a self-complementary adeno-associated virus (scAAV).
[0627] Embodiment 205. The vector of any one of embodiments 202-204, wherein the adeno-associated virus (AAV) is a recombinant adeno-associated virus (rAAV).
[0628] Embodiment 206. The vector of any one of embodiments 202-205, wherein the adeno-associated virus (AAV) comprises a sequence isolated or derived from an AAV of serotype AAV1, AAV2, AAV3, AAV4, AAVS, AAV6, AAV7, AAV8, AAV9, AAV10, AAV11, or AAV12.
[0629] Embodiment 207. The vector of any one of embodiments 202-206, wherein the adeno-associated virus (AAV) comprises a sequence isolated or derived from an AAV of serotype AAV9.
[0630] Embodiment 208. The vector of any one of embodiments 202-206, wherein the adeno-associated virus (AAV) comprise a sequence isolated or derived from Anc80
[0631] Embodiment 209. The vector of any one of embodiments 100-201, wherein the vector is a retrovirus.
[0632] Embodiment 210. The vector of embodiment any one of claims 100-201, wherein the retrovirus is a lentivirus.
[0633] Embodiment 211. The vector of embodiment 198, wherein the vector is a non-viral vector.
[0634] Embodiment 212. The vector of embodiment 211, wherein the non-viral vector comprises a nanoparticle, a micelle, a liposome or lipoplex, a polymersome, a polyplex or a dendrimer.
[0635] Embodiment 213. A composition comprising the vector of any one of embodiments 198-212.
[0636] Embodiment 214. A cell comprising the vector of any one of embodiments 198-212.
[0637] Embodiment 215. A cell comprising the composition of embodiment 214.
[0638] Embodiment 216. The cell of embodiment 214 or 215, wherein the cell is a mammalian cell.
[0639] Embodiment 217. The cell of embodiment 216, wherein the cell is a human cell.
[0640] Embodiment 218. The cell of any one of embodiments 215-217, whereinthe cell is an immune cell.
[0641] Embodiment 219. The cell of embodiment 218, wherein the immune cell is a T lymphocyte (T-cell).
[0642] Embodiment 220. The cell of embodiment 219, wherein the T-cell is an effector T-cell, a helper T-cell, a memory T-cell, a regulatory T-cell, a natural Killer T-cell, a mucosal-associated invariant T-cell, or a gamma delta T cell.
[0643] Embodiment 221. The cell of any one of embodiments 215-217, whereinthe immune cell is an antigen presenting cell.
[0644] Embodiment 222. The cell of embodiment 221, wherein the antigen presenting cell is a dendritic cell, a macrophage, or a B cell.
[0645] Embodiment 223. The cell of embodiment 221, wherein the antigen presenting cell is a somatic cell.
[0646] Embodiment 224. The cell of any one of embodiments 215-223, wherein the cell is a healthy cell.
[0647] Embodiment 225. The cell of any one of embodiments 215-223, wherein the cell is not a healthy cell.
[0648] Embodiment 226. The cell of embodiment 225, where the cell is isolated or derived from a subject having a disease or disorder.
[0649] Embodiment 227. A composition comprising the cell of any one of embodiments 215-226.
[0650] Embodiment 228. A method of masking a cell from an adaptive immune response comprising contacting a composition of any one of embodiments 1-197, 213 or 227 to the cell to produce a modified cell, wherein the composition modifies a level of expression of an RNA molecule of the modified cell and wherein the RNA molecule encodes a component of an adaptive immune response.
[0651] Embodiment 229. The method of embodiment 228, wherein the cell is in vivo, in vitro, ex vivo or in situ.
[0652] Embodiment 230. The method of embodiment 228, wherein the cell is in vitro or ex vivo.
[0653] Embodiment 231. The method of any one of embodiments 228-230, wherein a plurality of cells comprises the cell.
[0654] Embodiment 232. The method of embodiment 231, wherein each cell of the plurality of cells contacts the composition, thereby producing a plurality of modified cells.
[0655] Embodiment 233. The method of any one of embodiments 228-230, wherein the method further comprises administering the modified cell to a subject.
[0656] Embodiment 234. The method of any one of embodiments 231-232, wherein the method further comprises administering the plurality of modified cells to a subject.
[0657] Embodiment 235. The method of embodiment 233, wherein the cell is autologous.
[0658] Embodiment 236. The method of embodiment 233, wherein the cell is allogeneic.
[0659] Embodiment 237. The method of embodiment 233, wherein the plurality of modified cells is autologous.
[0660] Embodiment 238. The method of embodiment 233, wherein the plurality of modified cells is allogeneic.
[0661] Embodiment 239. The method of any one of embodiments 228-238, wherein the component of an adaptive immune response comprises or consists of a component of a type I major histocompatibility complex (MHC I), a type II major histocompatibility complex (MHC II), a T-cell receptor (TCR), a costimulatory molecule or a combination thereof.
[0662] Embodiment 240. The method of embodiment 239, wherein the MHC I component comprises an α1 chain, an α2 chain, an α3 chain, or a β2M protein.
[0663] Embodiment 241. The method of any one of embodiments 228-238, wherein the component of an adaptive immune response comprises or consists of an MHC I β2M protein.
[0664] Embodiment 242. The method of embodiment 239, wherein the MHC II component comprises an α1 chain, an α2 chain, a β1 chain, or a β2 chain.
[0665] Embodiment 243. The method of embodiment 239, wherein the TCR component comprises an α-chain and a β-chain.
[0666] Embodiment 244. The method of embodiment 239, wherein the costimulatory molecule comprises a Cluster of Differentiation 28 (CD28), a Cluster of Differentiation 80 (CD80), a Cluster of Differentiation 86 (CD86), an Inducible T-cell COStimulator (ICOS), or an ICOS Ligand (ICOSLG) protein.
[0667] Embodiment 245, A method of preventing or reducing an adaptive immune response in a subject comprising administering a therapeutically effective amount of a composition of any one of embodiments 1-197, 213 or 227 to the subject, wherein the composition contacts at least one cell in the subject producing a modified cell, wherein the composition modifies a level of expression of an RNA molecule of the modified cell and wherein the RNA molecule encodes a component of an adaptive immune response.
[0668] Embodiment 246. A method of treating a disease or disorder in a subject comprising administering a therapeutically effective amount of a composition of any one of embodiments 1-197, 213 or 227 to the subject, wherein the composition contacts at least one cell in the subject producing a modified cell, wherein the composition modifies a level of expression of an RNA molecule of the modified cell and wherein the composition prevents or reduces an adaptive immune response to the modified cell.
[0669] Embodiment 247. The method of embodiment 246, wherein the component of an adaptive immune response comprises or consists of a component of a type I major histocompatibility complex (MHC I), a type II major histocompatibility complex (MHC II), a T-cell receptor (TCR), a costimulatory molecule or a combination thereof.
[0670] Embodiment 248. The method of embodiment 247, wherein the MHC I component comprises an α1 chain, an α2 chain, an α3 chain, or a β2M protein.
[0671] Embodiment 249. The method of embodiment 247 or 248, wherein the component of an adaptive immune response comprises or consists of an MHC I β2M protein.
[0672] Embodiment 250. The method of embodiment 249, wherein the MHC II component comprises an α1 chain, an α2 chain, a β1 chain, or a β2 chain.
[0673] Embodiment 251. The method of embodiment 247, wherein the TCR component comprises an α-chain and a β-chain.
[0674] Embodiment 252. The method of embodiment 247, wherein the costimulatory molecule comprises a Cluster of Differentiation 28 (CD28), a Cluster of Differentiation 80 (CD80), a Cluster of Differentiation 86 (CD86), an Inducible T-cell COStimulator (ICOS), or an ICOS Ligand (ICOSLG) protein.
[0675] Embodiment 253. The method of any one of embodiments 246-252, wherein the disease or disorder is a genetic disease or disorder.
[0676] Embodiment 254. The method of embodiment 253, wherein the disease or disorder is a single gene genetic disease or disorder.
[0677] Embodiment 255. The method of embodiment 254, wherein the disease or disorder results from microsatellite instability.
[0678] Embodiment 256. The method of embodiment 255, wherein the microsatellite instability occurs in a DNA sequence at least 1, 2, 3, 4, 5 or 6 repeated motifs.
[0679] Embodiment 257. The method of embodiment 256, wherein an RNA molecule comprises a transcript of the DNA sequence and wherein the composition binds to a target sequence of the RNA molecule comprising at least 1, 2, 3, 4, 5, or 6 repeated motifs.
[0680] Embodiment 258. The method of any one of embodiments 246-257, wherein the composition is administered systemically.
[0681] Embodiment 259. The method of embodiment 259, wherein the composition is administered intravenously.
[0682] Embodiment 260. The method of embodiment 258 or 259, wherein the composition is administered by an injection or an infusion.
[0683] Embodiment 261. The method of any one of embodiments 246-257, wherein the composition is administered locally.
[0684] Embodiment 262. The method of embodiment 261, wherein the composition is administered by an intraosseous, intraocular, intracerebral, or intraspinal route.
[0685] Embodiment 263. The method of embodiment 261 or 262, wherein the composition is administered by an injection or an infusion.
[0686] Embodiment 264. The method of any one of embodiments 265-263, wherein the therapeutically effective amount is a single dose.
[0687] Embodiment 265. The method of any one of embodiments 265-264, wherein the composition is non-genome integrating.

### INCORPORATION BY REFERENCE

[0688] Every document cited herein, including any cross referenced or related patent or application is hereby incorporated herein by reference in its entirety unless expressly excluded or otherwise limited. The citation of any document is not an admission that it is prior art with respect to any invention disclosed or claimed herein or that it alone, or in any combination with any other reference or references, teaches, suggests or discloses any such invention. Further, to the extent that any meaning or definition of a term in this document conflicts with any meaning or definition of the same term in a document incorporated by reference, the meaning or definition assigned to that term in this document shall govern.

### Other Embodiments

[0689] While particular embodiments of the disclosure have been illustrated and described, various other changes and modifications can be made without departing from the spirit and scope of the disclosure. The scope of the appended claims includes all such changes and modifications that are within the scope of this disclosure.

The application's sequence listing, which the Patent Office published only in electronic form, follows.

SEQUENCE LISTING (14872 sequences)

SEQ ID NO: 1 - RNA, 20 nt, Artificial Sequence
  Space Sequence
uggagcgagcaucccccaaa

SEQ ID NO: 2 - RNA, 21 nt, Artificial Sequence
  Space Sequence
guuugggggaugcucgcucca

SEQ ID NO: 3 - RNA, 20 nt, Artificial Sequence
  Space Sequence
cccucacugcuggggagucc

SEQ ID NO: 4 - RNA, 20 nt, Artificial Sequence
  Space Sequence
ggacuccccagcagugaggg

SEQ ID NO: 5 - RNA, 20 nt, Artificial Sequence
  Space Sequence
gcaacuggaucaauuugcug

SEQ ID NO: 6 - RNA, 21 nt, Artificial Sequence
  Space Sequence
gcagcaaauugauccaguugc

SEQ ID NO: 7 - RNA, 21 nt, Artificial Sequence
  Space Sequence
gcauucuuaucuggucagugc

SEQ ID NO: 8 - RNA, 20 nt, Artificial Sequence
  Space Sequence
gcacugaccagauaagaaug

SEQ ID NO: 9 - RNA, 21 nt, Artificial Sequence
  Space Sequence
gagcagcagcagcagcagcag

SEQ ID NO: 10 - RNA, 21 nt, Artificial Sequence
  Space Sequence
gcaggcaggcaggcaggcagg

SEQ ID NO: 11 - RNA, 20 nt, Artificial Sequence
  Space Sequence
gccccggccccggccccggc

SEQ ID NO: 12 - RNA, 93 nt, Artificial Sequence
  Scaffold Sequence
guuuaagagcuaugcuggaaacagcauagcaaguuuaaauaaggcuaguccguuaucaacuugaaaaaguggcaccgagucggugcuuuuuuu

SEQ ID NO: 13 - RNA, 83 nt, Artificial Sequence
  Scaffold Sequence
guuuuagagcuagaaauagcaaguuaaaauaaggcuaguccguuaucaacuugaaaaaguggcaccgagucggugcuuuuuuu

SEQ ID NO: 14 - RNA, 20 nt, Artificial Sequence
  Space Sequence
gugauaaguggaaugccaug

SEQ ID NO: 15 - RNA, 20 nt, Artificial Sequence
  Space Sequence
cuggugaacuuccgauagug

SEQ ID NO: 16 - DNA, 20 bp, Artificial Sequence
  Space Sequence
gagatatagcctggtggttc

SEQ ID NO: 17 - RNA, 73 nt, Artificial Sequence
  Scaffold Sequence
ggacagcauagcaaguuaaaauaaggcuaguccguuaucaacuugaaaaaguggcaccgagucggugcuuuuu

SEQ ID NO: 18 - RNA, 3 nt, Artificial Sequence
  Space Sequence
cug

SEQ ID NO: 19 - RNA, 4 nt, Artificial Sequence
  Space Sequence
ccug

SEQ ID NO: 20 - protein, 128 aa, Unknown
  RNAse1
KESRAKKFQRQHMDSDSSPSSSSTYCNQMMRRRNMTQGLCKPVNTFVHEPLVDVQNVCFQEKVTCKNGQGNCYKSNSSMHITDCRLTNGSRYPNCAYRTSPKERHIIVACEGSPYVPVHFDASVEDST

SEQ ID NO: 21 - protein, 119 aa, Unknown
  RNAse4
QDGMYQRFLRQHVHPEETGGSDRYCDLMMQRRKMTLYHCKRFNTFIHEDIWNIRSICSTTNIQCKNGKMNCHEGVVKVTDCRDTGSSRAPNCRYRAIASTRRVVIACEGNPQVPVHFDG

SEQ ID NO: 22 - protein, 127 aa, Unknown
  RNAse6
WPKRLTKAHWFEIQHIQPSPLQCNRAMSGINNYTQHCKHQNTFLHDSFQNVAAVCDLLSIVCKNRRHNCHQSSKPVNMTDCRLTSGKYPQCRYSAAAQYKFFIVACDPPQKSDPPYKLVPVHLDSIL

SEQ ID NO: 23 - protein, 155 aa, Unknown
  RNAse7
APARAGFCPLLLLLLLGLWVAEIPVSAKPKGMTSSQWFKIQHMQPSPQACNSAMKNINKHTKRCKDLNTFLHEPFSSVAATCQTPKIACKNGDKNCHQSHGPVSLTMCKLTSGKYPNCRYKEKRQNKSYVVACKPPQKKDSQQFHLVPVHLDRVL

SEQ ID NO: 24 - protein, 122 aa, Unknown
  RNAse8
TSSQWFKTQHVQPSPQACNSAMSIINKYTERCKDLNTFLHEPFSSVAITCQTPNIACKNSCKNCHQSHGPMSLTMGELTSGKYPNCRYKEKHLNTPYIVACDPPQQGDPGYPLVPVHLDKVV

SEQ ID NO: 25 - protein, 134 aa, Unknown
  RNAse2
KPPQFTWAQWFETQHINMTSQQCTNAMQVINNYQRRCKNQNTFLLTTFANVVNVCGNPNMTCPSNKTRKNCHHSGSQVPLIHCNLTTPSPQNISNCRYAQTPANMFYIVACDNRDQRRDPPQYPVVPVHLDRII

SEQ ID NO: 26 - protein, 216 aa, Unknown
  RNAse6PL
DKRLRDNHEWKKLIMVQHWPETVCEKIQNDCRDPPDYWTIHGLWPDKSEGCNRSWPFNLEEIKKNWMEITDSSLPSPSMGPAPPRWMRSTPRRSTLAEAWNSTGSWTSTGGCALPPAALPSGDLCCRPSLTAGSRGVGVDLTALHQLLHVHYSATGIIPEECSEPTKPFQIILHHDHTEWVQSIGMPIWGTISSSESAIGKNEESQPACAVLSHDS

SEQ ID NO: 27 - protein, 722 aa, Unknown
  RNAseL
AAVEDNHLLIKAVQNEDVDLVQQLLEGGANVNFQEEEGGWTPLHNAVQMSREDIVELLLRHGADPVLRKKNGATPFILAAIAGSVKDLLKLFLSKGADVNECDFYGFTAFMEAAVYGKVKALKFLYKRGANVNLRRKTKEDQERLRKGGATALMDAAEKGHVEVLKILLDEMGADVNACDNMGRNALIHALLSSDDSDVEAITHLLLDHGADVNVRGERGKTPLILAVEKKHLGLVQRLLEQEHIEINDTDSDGKTALLLAVELKLKKIAELLCKRGASTDCGDLVMTARRNYDHSLVKVLLSHGAKEDFHPPAEDWKPQSSHWGAALKDLHRIYRPMIGKLKFFIDEKYKIADTSEGGIYLGFYEKQEVAVKTFCEGSPRAQREVSCLQSSRENSHLVTFYGSESHRGHLFVCVTLCEQTLEACLDVHRGEDVENEEDEFARNVLSSIFKAVQELHLSCGYTHQDLQPQNILIDSKKAAHLADFDKSIKWAGDPQEVKRDLEDLGRLVLYVVKKGSISFEDLKAQSNEEVVQLSPDEETKDLIHRLFHPGEHVRDCLSDLLGHPFFWTWESRYRTLRNVGNESDIKTRKSESEILRLLQPGPSEHSKSFDKWTTKINECVMKKMNKFYEKRGNFYQNTVGDLLKFIRNLGEHIDEEKHKKMKLKIGDPSLYFQKTFPDLVIYVYTKLQNTEYRKHFPQTHSPNKPQCDGAGGASGLASPGC

SEQ ID NO: 28 - protein, 217 aa, Unknown
  RNAseT2
VQHWPETVCEKIQNDCRDPPDYWTIHGLWPDKSEGCNRSWPFNLEEIKDLLPEMRAYWPDVIHSFPNRSRFWKHEWEKHGTCAAQVDALNSQKKYFGRSLELYRELDLNSVLLKLGIKPSINYYQVADFKDALARVYGVIPKIQCLPPSQDEEVQTIGQIELCLTKQDQQLQNCTEPGEQPSPKQEVWLANGAAESRGLRVCEDGPVFYPPPKKTKH

SEQ ID NO: 29 - protein, 183 aa, Unknown
  RNAse11
EASESTMKIIKEEFTDEEMQYDMAKSGQEKQTIEILMNPILLVKNTSLSMSKDDMSSTLLTFRSLHYNDPKGNSSGNDKECCNDMTVWRKVSEANGSCKWSNNFIRSSTEVMRRVHRAPSCKFVQNPGISCCESLELENTVCQFTTGKQFPRCQYHSVTSLEKILTVLTGHSLMSWLVCGSKL

SEQ ID NO: 30 - protein, 185 aa, Unknown
  RNAseT2-like
  misc_feature (1)..(1): Xaa can be any naturally occurring amino acid
XLGGADKRLRDNHEWKKLIMVQHWPETVCEKIQNDCRDPPDYWTIHGLWPDKSEGCNRSWPFNLEEIKDLLPEMRAYWPDVIHSFPNRSRFWKHEWEKHGTCAAQVDALNSQKKYFGRSLELYRELDLNSVLLKLGIKPSINYYQTTEEDLNLDVEPTTEDTAEEVTIHVLLHSALFGEIGPRRW

SEQ ID NO: 31 - protein, 299 aa, Unknown
  NOB1
APVEHVVADAGAFLRHAALQDIGKNIYTIREVVTEIRDKATRRRLAVLPYELRFKEPLPEYVRLVTEFSKKTGDYPSLSATDIQVLALTYQLEAEFVGVSHLKQEPQKVKVSSSIQHPETPLHISGFHLPYKPKPPQETEKGHSACEPENLEFSSFMFWRNPLPNIDHELQELLIDRGEDVPSEEEEEEENGFEDRKDDSDDDGGGWITPSNIKQIQQELEQCDVPEDVRVGCLTTDFAMQNVLLQMGLHVLAVNGMLIREARSYILRCHGCFKTTSDMSRVFCSHCGNKTLKKVSVTV

SEQ ID NO: 32 - protein, 210 aa, Unknown
  ENDOV
AFSGLQRVGGVDVSFVKGDSVRACASLVVLSFPELEVVYEESRMVSLTAPYVSGFLAFREVPFLLELVQQLREKEPGLMPQVLLVDGNGVLHHRGFGVACHLGVLTDLPCVGVAKKLLQVDGLENNALHKEKIRLLQTRGDSFPLLGDSGTVLGMALRSHDRSTRPLYISVGHRMSLEAAVRLTCCCCRFRIPEPVRQADICSREHIRKS

SEQ ID NO: 33 - protein, 249 aa, Unknown
  ENDOG
AELPPVPGGPRGPGELAKYGLPGLAQLKSRESYVLCYDPRTRGALWVVEQLRPERLRGDGDRRECDFREDDSVHAYHRATNADYRGSGFDRGHLAAAANHRWSQKAMDDTFYLSNVAPQVPHLNQNAWNNLEKYSRSLTRSYQNVYVCTGPLFLPRTEADGKSYVKYQVIGKNHVAVPTHFFKVLILEAAGGQIELRTYVMPNAPVDEAIPLERFLVPIESIERASGLLFVPNILARAGSLKAITAGSK

SEQ ID NO: 34 - protein, 479 aa, Unknown
  ENDOD1
RLVGEEEAGFGECDKFFYAGTPPAGLAADSHVKICQRAEGAERFATLYSTRDRIPVYSAFRAPRPAPGGAEQRWLVEPQIDDPNSNLEEAINEAEAITSVNSLGSKQALNTDYLDSDYQRGQLYPFSLSSDVQVATFTLTNSAPMTQSFQERWYVNLHSLMDRALTPQCGSGEDLYILTGTVPSDYRVKDKVAVPEFVWLAACCAVPGGGWAMGFVKHTRDSDIIEDVMVKDLQKLLPFNPQLFQNNCGETEQDTEKMKKILEVVNQIQDEERMVQSQKSSSPLSSTRSKRSTLLPPEASEGSSSFLGKLMGFIATPFIKLFQLIYYLVVAILKNIVYFLWCVTKQVINGIESCLYRLGSATISYFMAIGEELVSIPWKVLKVVAKVIRALLRILCCLLKAICRVLSIPVRVLVDVATFPVYTMGAIPIVCKDIALGLGGTVSLLFDTAFGTLGGLFQVVFSVCKRIGYKVTFDNSGEL

SEQ ID NO: 35 - protein, 380 aa, Unknown
  hFEN1
MGIQGLAKLIADVAPSAIRENDIKSYFGRKVAIDASMSIYQFLIAVRQGGDVLQNEEGETTSHLMGMFYRTIRMMENGIKPVYVFDGKPPQLKSGELAKRSERRAEAEKQLQQAQAAGAEQEVEKFTKRLVKVTKQHNDECKHLLSLMGIPYLDAPSEAEASCAALVKAGKVYAAATEDMDCLTFGSPVLMRHLTASEAKKLPIQEFHLSRILQELGLNQEQFVDLCILLGSDYCESIRGIGPKRAVDLIQKHKSIEEIVRRLDPNKYPVPENWLHKEAHQLFLEPEVLDPESVELKWSEPNEEELIKFMCGEKQFSEERIRSGVKRLSKSRQGSTQGRLDDFFKVTGSLSSAKRKEPEPKGSTKKKAKTGAAGKFKRGK

SEQ ID NO: 36 - protein, 186 aa, Homo Sapiens
ESTHVEFKRFTTKKVIPRIKEMLPHYVSAFANTQGGYVLIGVDDKSKEVVGCKWEKVNPDLLKKEIENCIEKLPTFHFCCEKPKVNFTTKILNVYQKDVLDGYVCVIQVEPFCCVVFAEAPDSWIMKDNSVTRLTAEQWVVMMLDTQSAPPSLVTDYNSCLISSASSARKSPGYPIKVHKFKEALQ

SEQ ID NO: 37 - protein, 262 aa, Homo Sapiens
TLQGTNTYLVGTGPRRILIDTGEPAIPEYISCLKQALTEFNTAIQEIVVTHWHRDHSGGIGDICKSINNDTTYCIKKLPRNPQREEIIGNGEQQYVYLKDGDVIKTEGATLRVLYTPGHTDDHMALLLEEENAIFSGDCILGEGTTVFEDLYDYMNSLKELLKIKADIIYPGHGPVIHNAEAKIQQYISHRNIREQQILTLFRENFEKSFTVMELVKIIYKNTPENLHEMAKHNLLLHLKKLEKEGKIFSNTDPDKKWKAHL

SEQ ID NO: 38 - protein, 518 aa, Homo Sapiens
MLRVVSWNINGIRRPLQGVANQEPSNCAAVAVGRILDELDADIVCLQETKVTRDALTEPLAIVEGYNSYFSFSRNRSGYSGVATFCKDNATPVAAEEGLSGLFATQNGDVGCYGNMDEFTQEELRALDSEGRALLTQHKIRTWEGKEKTLTLINVYCPHADPGRPERLVFKMRFYRLLQIRAEALLAAGSHVIILGDLNTAHRPIDHWDAVNLECFEEDPGRKWMDSLLSNLGCQSASHVGPFIDSYRCFQPKQEGAFTCWSAVTGARHLNYGSRLDYVLGDRTLVIDTFQASFLLPEVMGSDHCPVGAVLSVSSVPAKQCPPLCTRFLPEFAGTQLKILRFLVPLEQSPVLEQSTLQHNNQTRVQTCQNKAQVRSTRPQPSQVGSSRGQKNLKSYFQPSPSCPQASPDIELPSLPLMSALMTPKTPEEKAVAKVVKGQAKTSEAKDEKELRTSFWKSVLAGPLRTPLCGGHREPCVMRTVKKPGPNLGRRFYMCARPRGPPTDPSSRCNFFLWSRPS

SEQ ID NO: 39 - protein, 350 aa, Homo Sapiens
MLRVVSWNINGIRRPLQGVANQEPSNCAAVAVGRILDELDADIVCLQETKVTRDALTEPLAIVEGYNSYFSFSRNRSGYSGVATFCKDNATPVAAEEGLSGLFATQNGDVGCYGNMDEFTQEELRALDSEGRALLTQHKIRTWEGKEKTLTLINVYCPHADPGRPERLVFKMRFYRLLQIRAEALLAAGSHVIILGDLNTAHRPIDHWDAVNLECFEEDPGRKWMDSLLSNLGCQSASHVGPFIDSYRCFQPKQEGAFTCWSAVTGARHLNYGSRLDYVLGDRTLVIDTFQASFLLPEVMGSDHCPVGAVLSVSSVPAKQCPPLCTRFLPEFAGTQLKILRFLVPLEQSP

SEQ ID NO: 40 - protein, 123 aa, Homo Sapiens [sequence omitted]

SEQ ID NO: 41 - protein, 136 aa, Homo Sapiens
SSLIRRVISTAKAPGAIGPYSQAVLVDRTIYISGQIGMDPSSGQLVSGGVAEEAKQALKNMGEILKAAGCDFTNVVKTTVLLADINDFNTVNEIYKQYFKSNFPARAAYQVAALPKGSRIEIEAVAIQGPLTTASL

SEQ ID NO: 42 - protein, 189 aa, Homo Sapiens
GGGTPKAPNLEPPLPEEEKEGSDLRPVVIDGSNVAMSHGNKEVFSCRGILLAVNWFLERGHTDITVFVPSWRKEQPRPDVPITDQHILRELEKKKILVFTPSRRVGGKRVVCYDDRFIVKLAYESDGIVVSNDTYRDLQGERQEWKRFIEERLLMYSFVNDKFMPPDDPLGRHGPSLDNFLRKKPLTLE

SEQ ID NO: 43 - protein, 598 aa, Homo Sapiens
SGPCGEKPVLEASPTMSLWEFEDSHSRQGTPRPGQELAAEEASALELQMKVDFFRKLGYSSTEIHSVLQKLGVQADTNTVLGELVKHGTATERERQTSPDPCPQLPLVPRGGGTPKAPNLEPPLPEEEKEGSDLRPVVIDGSNVAMSHGNKEVFSCRGILLAVNWFLERGHTDITVFVPSWRKEQPRPDVPITDQHILRELEKKKILVFTPSRRVGGKRVVCYDDRFIVKLAYESDGIVVSNDTYRDLQGERQEWKRFIEERLLMYSFVNDKFMPPDDPLGRHGPSLDNFLRKKPLTLEHRKQPCPYGRKCTYGIKCRFFHPERPSCPQRSVADELRANALLSPPRAPSKDKNGRRPSPSSQSSSLLTESEQCSLDGKKLGAQASPGSRQEGLTQTYAPSGRSLAPSGGSGSSFGPTDWLPQTLDSLPYVSQDCLDSGIGSLESQMSELWGVRGGGPGEPGPPRAPYTGYSPYGSELPATAAFSAFGRAMGAGHFSVPADYPPAPPAFPPREYWSEPYPLPPPTSVLQEPPVQSPGAGRSPWGRAGSLAKEQASVYTKLCGVFPPHLVEAVMGRFPQLLDPQQLAAEILSYKSQHPSE

SEQ ID NO: 44 - protein, 136 aa, Homo Sapiens; identical to SEQ ID NO: 41

SEQ ID NO: 45 - protein, 966 aa, Ruminococcus flavefaciens
IEKKKSFAKGMGVKSTLVSGSKVYMTTFAEGSDARLEKIVEGDSIRSVNEGEAFSAEMADKNAGYKIGNAKFSHPKGYAVVANNPLYTGPVQQDMLGLKETLEKRYFGESADGNDNICIQVIHNILDIEKILAEYITNAAYAVNNISGLDKDIIGFGKFSTVYTYDEFKDPEHHRAAFNNNDKLINAIKAQYDEFDNFLDNPRLGYFGQAFFSKEGRNYIINYGNECYDILALLSGLAHWVVANNEEESRISRTWLYNLDKNLDNEYISTLNYLYDRITNELTNSFSKNSAANVNYIAETLGINPAEFAEQYFRFSIMKEQKNLGFNITKLREVMLDRKDMSEIRKNHKVFDSIRTKVYTMMDFVIYRYYIEEDAKVAAANKSLPDNEKSLSEKDIFVINLRGSFNDDQKDALYYDEANRIWRKLENIMHNIKEFRGNKTREYKKKDAPRLPRILPAGRDVSAFSKLMYALTMFLDGKEINDLLTTLINKFDNIQSFLKVMPLIGVNAKFVEEYAFFKDSAKIADELRLIKSFARMGEPIADARRAMYIDAIRILGTNLSYDELKALADTFSLDENGNKLKKGKHGMRNFIINNVISNKRFHYLIRYGDPAHLHEIAKNEAVVKFVLGRIADIQKKQGQNGKNQIDRYYETCIGKDKGKSVSEKVDALTKIITGMNYDQFDKKRSVIEDTGRENAEREKFKKIISLYLTVIYHILKNIVNINARYVIGFHCVERDAQLYKEKGYDINLKKLEEKGFSSVTKLCAGIDETAPDKRKDVEKEMAERAKESIDSLESANPKLYANYIKYSDEKKAEEFTRQINREKAKTALNAYLRNTKWNVIIREDLLRIDNKTCTLFANKAVALEVARYVHAYINDIAEVNSYFQLYHYIMQRIIMNERYEKSSGKVSEYFDAVNDEKKYNDRLLKLLCVPFGYCIPRFKNLSIEALFDRNEAAKFDKEKKKVSGNS

SEQ ID NO: 46 - protein, 1034 aa, Unknown
  Cas13d (contig e-k87 11092736)
MKRQKTFAKRIGIKSTVAYGQGKYAITTFGKGSKAEIAVRSADPPEETLPTESDATLSIHAKFAKAGRDGREFKCGDVDETRIHTSRSEYESLISNPAESPREDYLGLKGTLERKFFGDEYPKDNLRIQIIYSILDIQKILGLYVEDILHFVDGLQDEPEDLVGLGLGDEKMQKLLSKALPYMGFFGSTDVFKVTKKREERAAADEHNAKVFRALGAIRQKLAHFKWKESLAIFGANANMPIRFFQGATGGRQLWNDVIAPLWKKRIERVRKSFLSNSAKNLWVLYQVFKDDTDEKKKARARQYYHFSVLKEGKNLGFNLTKTREYFLDKFFPIFHSSAPDVKRKVDTFRSKFYAILDFIIYEASVSVANSGQMGKVAPWKGAIDNALVKLREAPDEEAKEKIYNVLAASIRNDSLFLRLKSACDKFGAEQNRPVFPNELRNNRDIRNVRSEWLEATQDVDAAAFVQLIAFLCNFLEGKEINELVTALIKKFEGIQALIDLLRNLEGVDSIRFENEFALFNDDKGNMAGRIARQLRLLASVGKMKPDMTDAKRVLYKSALEILGAPPDEVSDEWLAENILLDKSNNDYQKAKKTVNPFRNYIAKNVITSRSFYYLVRYAKPTAVRKLMSNPKIVRYVLKRLPEKQVASYYSAIWTQSESNSNEMVKLIEMIDRLTTEIAGFSFAVLKDKKDSIVSASRESRAVNLEVERLKKLTTLYMSIAYIAVKSLVKVNARYFIAYSALERDLYFFNEKYGEEFRLHFIPYELNGKTCQFEYLAILKYYLARDEETLKRKCEICEEIKVGCEKHKKNANPPYEYDQEWIDKKKALNSERKACERRLHFSTHWAQYATKRDENMAKHPQKWYDILASHYDELLALQATGWLATQARNDAEHLNPVNEFDVYIEDLRRYPEGTPKNKDYHIGSYFEIYHYIRQRAYLEEVLAKRKEYRDSGSFTDEQLDKLQKILDDIRARGSYDKNLLKLEYLPFAYNLPRYKNLTTEALFDDDSVSGKKRVAEWREREKTREAEREQRRQR

SEQ ID NO: 47 - DNA, 30 bp, Unknown
  contig e-k87 11092736
gtgagaagtctccttatggggagatgctac

SEQ ID NO: 48 - protein, 1022 aa, Unknown
  Cas13d (160582958 gene49834)
MKNSVTFKLIQAQENKEAARKKAKDIAEQARIAKRNGVVKKEENRINRIQIEIQTQKKSNTQNAYHLKSLAKAAGVKSVFAIGNDLLMTGFGPGNDATIEKRVFQNRAIETLSSPEQYSAEFQNKQFKIKGNIKVLNHSTQKMEEIQTELQDNYNRPHFDLLGCKNVLEQKYFGRTFSDNIHVQIAYNIMDIEKLLTPYINNIIYTLNELMRDNSKDDFFGCDSHFSVAYLYDELKAGYSDRLKTKPNLSKNIDRIWNNFCNYMNSDSGNTEARLAYFGELFYKPKETGDAKSDYKTHLSNNQKEEWELKSDKEVYNIFAILCDLRHFCTHGESITPSGKPFPYNLEKNLFPEAKQVLNSLFEEKAESLGAEAFGKTAGKTDVSILLKVFEKEQASQKEQQALLKEYYDFKVQKTYKNMGFSIKKLREAIMEIPDAAKFKDDLYSSLRHKLYGLFDFILVKHFLDTSDSENLQNNDIFRQLRACRCEEEKDQVYRSIAVKVWEKVKKKELNMFKQVVVIPSLSKDELKQMEMTKNTELLSSIETISTQASLFSEMIFMMTYLLDGKEINLLCTSLIEKFENIASFNEVLKSPQIGYETKYTEGYAFFKNADKTAKELRQVNNMARMTKPLGGVNTKCVMYNEAAKILGAKPMSKAELESVFNLDNHDYTYSPSGKKIPNKNFRNFIINNVITSRRFLYLIRYGNPEKIRKIAINPSIISFVLKQIPDEQIKRYYPPCIGKRTDDVTLMRDELGKMLQSVNFEQFSRVNNKQNAKQNPNGEKARLQACVRLYLTVPYLFIKNMVNINARYVLAFHCLERDHALCFNSRKLNDDSYNEMANKFQMVRKAKKEQYEKEYKCKKQETGTAHTKKIEKLNQQIAYIDKDIKNMHSYTCRNYRNLVAHLNVVSKLQNYVSELPNDYQITSYFSFYHYCMQLGLMEKVSSKNIPLVESLKNEANDAQSYSAKKTLEYFDLIEKNRTYCKDFLKALNAPFSYNLPRFKNLSIEALFDKNIVYEQADLKKE

SEQ ID NO: 49 - DNA, 36 bp, Unknown
  Cas13d (160582958 gene49834)
gaactacacccctctgttcttgtaggggtctaacac

SEQ ID NO: 50 - protein, 877 aa, Unknown
  Cas13d (contig tpg DJXD01000002.1
MKKQKSKKTVSKTSGLKEALSVQGTVIMTSFGKGNMANLSYKIPSSQKPQNLNSSAGLKNVEVSGKKIKFQGRHPKIATTDNPLFKPQPGMDLLCLKDKLEMHYFGKTFDDNIHIQLIYQILDIEKILAVHVNNIVFTLDNVLHPQKEELTEDFIGAGGWRINLDYQTLRGQTNKYDRFKNYIKRKELLYFGEAFYHENERRYEEDIFAILTLLSALRQFCFHSDLSSDESDHVNSFWLYQLEDQLSDEFKETLSILWEEVTERIDSEFLKTNTVNLHILCHVFPKESKETIVRAYYEFLIKKSFKNMGFSIKKLREIMLEQSDLKSFKEDKYNSVRAKLYKLFDFIITYYYDHHAFEKEALVSSLRSSLTEENKEEIYIKTARTLASALGADFKKAAADVNAKNIRDYQKKANDYRISFEDIKIGNTGIGYFSELIYMLTLLLDGKEINDLLTTLINKFDNIISFIDILKKLNLEFKFKPEYADFFNMTNCRYTLEELRVINSIARMQKPSADARKIMYRDALRILGMDNRPDEEIDRELERTMPVGADGKFIKGKQGFRNFIASNVIESSRFHYLVRYNNPHKTRTLVKNPNVVKFVLEGIPETQIKRYFDVCKGQEIPPTSDKSAQIDVLARIISSVDYKIFEDVPQSAKINKDDPSRNFSDALKKQRYQAIVSLYLTVMYLITKNLVYVNSRYVIAFHCLERDAFLHGVTLPKMNKKIVYSQLTTHLLTDKNYTTYGHLKNQKGHRKWYVLVKNNLQNSDITAVSSFRNIVAHISVVRNSNEYISGIGELHSYFELYHYLVQSMIAKNNWYDTSHQPKTAEYLNNLKKHHTYCKDFVKAYCIPFGYVVPRYKNLTINELFDRNNPNPEPKEEV

SEQ ID NO: 51 - DNA, 36 bp, Homo sapiens
caactacaaccccgtaaaaatacggggttctgaaac

SEQ ID NO: 52-53 - skipped (2 entries)

SEQ ID NO: 54 - protein, 124 aa, Unknown
  CasRX/Cas13d Gut metagenome contig6049000251
LYLTSFGKGNAAVIEQKIEPENGYRVTGMQITPSITVNKATDESVRFRVKRKIAQKDEFIADNPMHEGRHRIEPSAGSDMLGLKTKLEKYYFGKEFDDNLHIQIIYNILDIEKILAVYSTNITA

SEQ ID NO: 55-56 - skipped (2 entries)

SEQ ID NO: 57 - protein, 358 aa, Unknown
  CasRX/Cas13d Gut metagenome contig546000275
MDSYRPKLYKLIDFCIFKHYHEYTEISEKNVDTLRAAVSEEQKESFYADEAKRLWGIFDKQFLGFCKKINVWVNGSHEKEILGYIDKDAYRKKSDVSYFSKFLYAMSFFLDGKEINDLLTTLINKFDNIASFISTAKELDAEIDRILEKKLDPVTGKPLKGKNSFRNFIANNVIENKRFIYVIKFCNPKNVLKLVKNTKVTEFVLKRMPESQIDRYYSSCIDTEKNPSVDKKISDLAEMIKKIAFDDFRNVRQKTRTREESLEKERFKAVIGLYLTVVYLLIKNLVNVNSRYVMAFHCLERDAKLYGINIGKNYIELTEDLCRENENSRSAYLARNKRLRDCVKQNIDNAKNMKSKEK

SEQ ID NO: 58-60 - skipped (3 entries)

SEQ ID NO: 61 - protein, 149 aa, Unknown
  CasRX/Cas13d Gut metagenome contig4114000374
DTKINPQTWLYQLENTPDLDNEYRDTLDHFFDERFNEINEHFVTQNATNLCIMKEVFPDEDFKSIADLYYDFIVVKSYKNIGFSIKKLREKMLELPEAKRVTSTEMDSVRSKLYKLIDFCIFKHYHEKPETVEMIVSMLRAYTSEDMKE

SEQ ID NO: 62-66 - skipped (5 entries)

SEQ ID NO: 67 - protein, 320 aa, Unknown
  CasRX/Cas13d Gut metagenome contig721000619
KEGSTMAKNEKKKSTAKALGLKSSFVVNNDIYMTSFGKGNKAVLEKKITENTIENKSDTTYFDVINRDPKGFTLEGRRIADMTAFSNDPKYHVNVVNGKFLEDQLGARSELEKKVFGRTFDDNVHIQLIHNILDIEKIMAQYVSDIVYLLHNTIKRDMNDDIMGYISIRNSFDDFCHPERIPDRKAKDNLQKQHDIFFDEILKCGRLAYFGNAFFEDGSDNKEIAKLKRYKEIYHIIALMGSLRQSYFHGENSDKNFQGPTWAYTLESNLTGKYKEFKDTLDKTFDERYEMISKDFGSTNMVNLQILEELLKMLYGNVSP

SEQ ID NO: 68 - skipped

SEQ ID NO: 69 - protein, 204 aa, Unknown
  CasRX/Cas13d Gut metagenome contig2002000411
EKQNKAKYQAIISLYLMVMYQIVKNMIYVNSRYVIAFHCLERDSNQLLGRFNSRDASMYNKLTQKFITDKYLNDGAQGCSKKVGNYLSHNITCCSDELRKEYRNQVDHFAVVRMIGKYAADIGKFSTWFELYHYVMQRIIFDKRNPLSETERTYKQLIAKHHTYCKDLVKALNTPFGYNLARYKNLSIGELFDRNNYNAKTKET

SEQ ID NO: 70 - skipped

SEQ ID NO: 71 - protein, 449 aa, Unknown
  CasRX/Cas13d Gut metagenome contig13552000311
LIDFLIYDLYYNRKPARIEEIVDKLRESVNDEEKESIYSAETKYVYEALGKVLVRSLKKYLNGATIRDLKNRYDAKTANRIWDISEHSKSGHVNCFCKLIYMMTLMLDGKEINDLLTTLVNKFDNIASFIDVMDELGLEHSFTDNYKMFADSKAICLDLQFINSFARMSKIDDEKSKRQLFRDALVVLDIGDKNEDWIEKYLTSDIFKRDENGNKIDGEKRDFRNFIANNVIKSARFKYLVKYSSADGMIKLKKNEKLISFVLEQLPETQIDRYYESCGLDCAVADRKVRIEKLTGLIRDMRFDNFRGVNYSNDACKKDKQAKAKYQAIISLYLMVLYQIVKNMIYVNSRYVIAFHCLERDLLFFNIELDNSYQYSNCNELTEKFIKDKYMKEGALGFNMKAGRYLTKNIGNCSNELRKIYRNQVDHFAVVRKIGNYAADIASVGSWFE

SEQ ID NO: 72 - protein, 96 aa, Unknown
  CasRX/Cas13d Gut metagenome contig10037000527
YMDQNFANSDAWAIHVYRNKIQHLDAVRHADMYIGDIREFHSWFELYHYIIQRRIIDQYAYESTPGSSRDGSAIIDEERLNPATRRYFRLITTYKT

SEQ ID NO: 73 - protein, 519 aa, Unknown
  CasRX/Cas13d Gut metagenome contig238000329
RYDKDRSKIYTMMDFVIYRYYIDNNNDSIDFINKLRSSIDEKSKEKLYNEEANRLWNKLKEYMLYIKEFNGKLASRTPDRDGNISEFVESLPKIHRLLPRGQKISNFSKLMYLLTMFLDGKEINDLLTTLINKFENIQGFLDIMPEINVNAKFEPEYVFFNKSHEIAGELKLIKGFAQMGEPAATLKLEMTADAIKILGTEKEDAELIKLAESLFKDENGKLLGNKQHGMRNFIGNNVIKSKRFHYLIRYGDPAHLHKIATNKNVVRFVLGRIADMQKKQGQKGKNQIDRYYEVCVGNKDIKKTIEEKIDALTDIIVNMNYDQFEKKKAVIENQNRGKTFEEKNKYKRDNAEREKFKKIISLYLTVIYHILKNIVNVNSRYILGFHCLERDKQLYIEKYNKDKLDGFVALTKFCLGDEERYEDLKAKAQASIQALETANPKLYAKYMNYSDEEKKEEFKKQLNRERVKNARNAYLKNIKNYIMIRLQLRDQTDSSGYLCGEFRDKVAHLEVARHAHEYI

SEQ ID NO: 74 - RNA, 20 nt, Artificial Sequence
  Space Sequence
ggggccggggccggggccgg

SEQ ID NO: 75 - RNA, 20 nt, Artificial Sequence
  Space Sequence
gggccggggccggggccggg

SEQ ID NO: 76 - RNA, 20 nt, Artificial Sequence
  Space Sequence
ggccggggccggggccgggg

SEQ ID NO: 77 - RNA, 20 nt, Artificial Sequence
  Space Sequence
gccggggccggggccggggc

SEQ ID NO: 78 - RNA, 20 nt, Artificial Sequence
  Space Sequence
ccggggccggggccggggcc

SEQ ID NO: 79 - RNA, 20 nt, Artificial Sequence
  Space Sequence
cggggccggggccggggccg

SEQ ID NO: 80 - RNA, 3 nt, Artificial Sequence
  Space Sequence
cag

SEQ ID NO: 81 - RNA, 6 nt, Artificial Sequence
  Space Sequence
ggggcc

SEQ ID NO: 82 - RNA, 93 nt, Artificial Sequence; identical to SEQ ID NO: 12
  Scaffold Sequence

SEQ ID NO: 83 - RNA, 83 nt, Artificial Sequence; identical to SEQ ID NO: 13
  Scaffold Sequence

SEQ ID NO: 84 - protein, 181 aa, Unknown
  CasRX/Cas13d Gut metagenome contig2643000492
NGEIVSLAEKEAFSAKIADKNIGCKIENKQFRHPKGYDVIADNPIYKGSPRQDMLGLKETLEKRYFSPSDSIDNVRVQVAHNILDIEKILAEYITNAVYSFDNIAGFGKDIIGDDFSPVYTYDKFEKSDRYEYFKNLLNNSRLGYYGQAFFECDDSKENKKKKDAIKCYNIIALLSGLRHW

SEQ ID NO: 85 - protein, 440 aa, Unknown
  CasRX/Cas13d Gut metagenome contig874000057
MSKNKESYAKGMGLKSALVSGSKVYMTSFEGGNDAKLEKVVENSEIVSLAEKESFSAEIFKKNIGCKIENKKFKHPKRYDVIADNPLYKGSVRQDMLGLKETLEKRYFNSADGTDNVCIQVIHNILDIEKILAEYITNAVYSFDNIAGFGEDIIGMGGFKPIYTYKQFKEPDKYNKKFDDILNNSRLGYYGKAFFEKNDLKHNPNKKKRDKNPYILKYDNECYYIIALLSGLRHWNIHSHAKDDLVSYRWLYNLDSILNREYISTLNYLYDDIADELTESFSKNSSANVNYIAETLNIDPSEFAQQYFRFSIMKEQKNMGFNVSKLREIMLDRKELSDIRDNHRVFDSIRSKLYTMMDFVIYRYYIEEAAKTEAENRNLPENEKKISEKDFFVINLRGSFDENQKEKLYIEEAKRLWEKLKDIMLKIKEFRGEKVKEYKK

SEQ ID NO: 86 - protein, 137 aa, Unknown
  CasRX/Cas13d Gut metagenome contig4781000489
LDKQLDYEYIRTLNYMFNDIADELTRTFSKNSAANVNYIAETLNIDPNKFAEQYFRFSIMKEQKNLGFNLTKLRESMLDRRELSDIRDNHNVFDSIRPKLYTMMDFVIYKHYIDEAKKTEAENKSLPDDRKNLSEKD

SEQ ID NO: 87 - protein, 87 aa, Unknown
  CasRX/Cas13d Gut metagenome contig12144000352
RMGEPVANTKRVMMIDAVKILGTDLSDDELKEMADSFFKDSDGNLLKKGKHGMRNFITNNVIKNKRFHYLIRYGDPAHLHEIAKNEA

SEQ ID NO: 88 - protein, 414 aa, Unknown
  CasRX/Cas13d Gut metagenome contig5590000448
VHNNEEKDLIKYTWLYNLDKYLDAEYITTLNYMYNDIGDELTDSFSKNSAANINYIAETLGIDPKTFAEQYFRFSIMKEQKNLGFNLTKLREVMLDRKDMSEIRENHNDFDSIRAKVYTMMDFVIYRYYIEEAAKVNAANKSLPDNEKSLSEKDIFVISLRGSFNEDQKDRLYYDEAQRLWSKVGKLMLKIKKFRGKDTRKYKNMGTPRIRRLIPEGRDISTFSKLMYALTMFLDGKEINDLLTTLINKFDNIQSFLKVMPLIGVNAKFAEEYSFFNNSEKIADELRLIKSFARMGEPVADARRAMYIDAIRILGTDLSDDELKALADSFSLDENGNKLGKGKHGMRNFIINNVITNKRFHYLIRYGNPVHLHEIAKNEAVVKFVLGRIADIQKKQGQNGKNQIDRYYETCIGK

SEQ ID NO: 89 - protein, 345 aa, Unknown
  CasRX/Cas13d Gut metagenome contig525000349
MSKKENRKSYVKGLGLKSTLVSDSKVYLTTFADGSNAKLEKCVENNKIICISNDKEAFAASIANKNVGYKIKNDEKFRHPKGYDIISNNPLLHNNSVQQDMLGLKNVLEKRYFGKSSGGDNNLCIQIIHNIIDIEKILSEYIPNVVYAFNNIAGFKDEHNNIIDIIGTQTYNSSYTYADFSKDKSDKKYIEFQKLLKNKRLGYWGKAFFTGQGNNAKVRQENQCFHIIALLISLRNWATHSNELDKHTKRTWLYKLDDTNILNAEYVKTLNYLYDTIADELTKSFSKNGAVNVNYLAKKYNIKDDLPGFSEQYFRFSIMKEQKNLGFNISKLRENMLDFKDMSVI

SEQ ID NO: 90 - protein, 206 aa, Unknown
  CasRX/Cas13d Gut metagenome contig7229000302
KKISSLTKFCLGESDEKKLKALAKKSLEELKTTNSKLYENYIKYSDERKAEEAKRQINRERAKTAMNAHLRNTKWNDIMYGQLKDLADSKSRICSEFRNKAAHLEVARYAHMYINDISEVKSYFRLYHYIMQRRIIDVIENNPKAKYEGKVKVYFEDVKKNKKYNKNLLKLMCVPFGYCIPRFKNLSIEQMFDMNETDNSDKKKEK

SEQ ID NO: 91 - protein, 95 aa, Unknown
  CasRX/Cas13d Gut metagenome contig3227000343
IGDISEVNSYFQLYHYIMQRILIDKIGSKTTGKAKEYFDSVIVNKKYDDRLLKLLCSPLGYCLTRYKDLSIEALFDMNEAAKYDKLNKERKNKKK

SEQ ID NO: 92 - protein, 115 aa, Unknown
  CasRX/Cas13d Gut metagenome contig7030000469
SIRSKLYTMMDFVIYRYYIEESAKAAAENKPSESDSFVIRLRGSFNENQKEELYIEEAERLWKKFGEIMLKIKEFRGEKVKEYKKEVPRIERILPHGKDISAFSKLMYMLSMFLD

SEQ ID NO: 93 - protein, 234 aa, Unknown
  CasRX/Cas13d gut metagenome P17E0k2120140920, c87000043
MYFSKMIYMLTYFLDGKEINDLLTTLISKFDNIKEFLKIMKSSAVDVECELTAGYKLFNDSQRITNELFIVKNIASMRKPAASAKLTMFRDALTILGIDDKITDDRISEILKLKEKGKGIHGLRNFITNNVIESSRFVYLIKYANAQKIREVAKNEKVVMFVLGGIPDTQIERYYKSCVEFPDMNSSLEAKRSELARMIKNISFDDFKNVKQQAKGRENVAKERAKAVIGLYLT

SEQ ID NO: 94 - protein, 939 aa, Unknown
  contig emb OBVH01003037.1, human gut metagenome sequence
MAKKKRITAKERKQNHRELLMKKADSNAEKEKAKKPVVENKPDTAISKDNTPKPNKEIKKSKAKLAGVKWVIKANDDVAYISSFGKGNNSVLEKRIMGDVSSNVNKDSHMYVNPKYTKKNYEIKNGFSSGSSLVTYPNKPDKNSGMDALCLKPYFEKDFFGHIFTDNMHIQAIYNIFDIEKILAKHITNIIYTVNSFDRNYNQSGNDTIGFGLNYRVPYSEYGGGKDSNGEPKNQSKWEKRDNFIKFYNESKPHLGYYENIFYDHGEPISEEKFYNYLNILNFIRNNTFHYKDDDIELYSENYSEEFVFINCLNKFVKNKFKNVNKNFISNEKNNLYIILNAYGKDTENVEVVKKYSKELYKLSVLKTNKNLGVNVKKLRESAIEYGYCPLPYDKEKEVAKLSSVKHKLYKTYDFVITHYLNSNDKLLLEIVETLRLSKNDDEKENVYKKYAEKLFKADDVINPIKAISKLFARKGNKLFKEKIIIKKEYIEDVSIDKNIYDFTKVIFFMTCFLDGKEINDLLTNIISKLQVIEDHNNVIKFISNNKDAVYKDYSDKYAIFRNAGKIATELEAIKSIARMENKIENAPQEPLLKDALLSLGVSDDTKVLENTYNKYFDSKEKTDKQSQKVSTFLMNNVINNNRFKYVIKYINPADINGLAKNRYLVKFVLSKIPEEQIDSYYKLFSNEEEPGCEEKIKLLTKKISKLNFQTLFENNKIPNVEKEKKKAIITLYFTIVYILVKNLVNINGLYTLALYFVERDGYFYKDICGKKDKKKSYNDVDYLLLPEIFSGSKYREETKNLKLPKEKDRDIMKKYLPNDKDREKYNKFFTAYRNNIVHLNIIAKLSELTKNIDKDINSYFDIYHYCTQRVMFNYCKEKNDVVLAKMKDLAHIKSDCNEFSSKHTYPFSSAVLRFMNLPFAYNVPRFKNLSYKKFFDKQ

SEQ ID NO: 95 - protein, 877 aa, Unknown; identical to SEQ ID NO: 50
  contig  tpg DJXD01000002.1

SEQ ID NO: 96 - DNA, 36 bp, Unknown; identical to SEQ ID NO: 51
  CasRX/Cas13d DR

SEQ ID NO: 97 - protein, 984 aa, Unknown
  contig OGZC01000639.1
MKKKNIRATREALKAQKIKKSQENEALKKQKLAEEAAQKRREELEKKNLAQWEETSAEGRRSRVKAVGVKSVFVVGDDLYLATFGNGNETVLEKKITPDGKITTFPEEETFTAKLKFAQTEPTVATSIGISNGRIVLPEISVDNPLHTTMQKNTIKRSAGEDILQLKDVLENRYFDRSFNDDLHIRLIYNILDIEKILAEYTTNAVFAIDNVSGCSDDFLSNFSTRNQWDEFQNPEQHREHFGNKDNVICSVKKQQDLFFNFFKNNRIGYFGKAFFHAESERKIVKKTEKEVYHILTLIGSLRQWITHSTEGGISRLWLYQLEDALSREYQETMNNCYNSTIYGLQKDFEKTNAPNLNFLAEILGKNASELAEPYFRFIITKEYKNLGFSIKTLREMLLDQPDLQEIRENHNVYDSIRSKLYKMIDFVLVYAYSNERKSKADALASNLRSAITEDAKKRIYQNEADQLWTSYQELFKRIRGFKGAQVKEYSSKNMPIPIQKQIQNILKPAEQVTYFTKLMYLLTMFLDGKEINDLLTTLINKFDNISSLLKTMEQLELQTTFKEDYTFFQQSSRLCKEITQLKSFARMGNPISNLKEVMMVDAIQILGTEKSEQELQSMACFFFRDKNGKKLNTGEHGMRNFIGNNVISNTRFQYLIRYGNPQKLHTLSQNETVVRFVLSRIAKNQRVQGMNGKNQIDRYYETCGGTNSWSVSEEEKINFLCKILTNMSYDQFQDVKQSGAEITAEEKRKKERYKAIISLYLTVLYQLIKNLVNINARYIIAFHCLERDAILYSSKFNTSINLKKRYTALTEMILGYETDEKARRKDTRTVYEKAEAAKNRHLKNVKWNCKTRENLENADKNAIVAFRNIVAHLWIIRDADRFITGMGAMKRYFDCYHYLLQRELGYILEKSNQGSEYTKKSLEKVQQYHSYCKDFLHMLCLPFAYCIPRYKNLSIAELFDRHEPEAEPKEEASSVNNSQFITT

SEQ ID NO: 98 - protein, 978 aa, Unknown
  contig emb OHBM01000764.1
  misc_feature (1)..(222): Xaa can be any naturally occurring amino acid
XXXXXXXXXXXXXXXXXXXXXXXXXXXXXXXXXXXXXXXXXXXXXXXXXXXXXXXXXXXXXXXXXXXXXXXXXXXXXXXXXXXXXXXXXXXXXXXXXXXXXXXXXXXXXXXXXXXXXXXXXXXXXXXXXXXXXXXXXXXXXXXXXXXXXXXXXXXXXXXXXXXXXXXXXXXXXXXXXXXXXXXXXXXXXXXXXXXXXXXXXXXXXXXXXXXXXXXXXXXXXXHPLQKRYRYLTSTNLKSFETYKNNLVNKKKFDLDRVKKIPQLAYFGSAFYNTPEDTSAKITKTKIKSNEEIYYTFMLLSTARNFSAHYLDRNRAKSSDAEDFDGTSVIMYNLDNEELYKKLYNKKVHMALTGMKKVLDANFNKKVEHLNNSFIKNSAKDFVILCEVLGIKSRDEKTKFVKDYYDFVVRKNYKHLGFSVKELRELLFANHDSNKYIKEFDKISNKKFDSVRSRLNRLADYIIYDYYNKNNAKVSDLVKYLRAAADDEQKKKIYLNESINLVKSGILERIKKILPKLNGKIIGNMQPDSTITASMLHNTGKDWHPISENAHYFTKWIYTLTLFMDGKEINDLVTTLINKFDNIASFIEVLKSQSVCTHFSEERKMFIDSAEICSELSAMNSFARMEAPGASSKRAMFVEAARILGDNRSKEELEEYFDTLFDKSASKKEKGFRNFIRNNVVDSNRFKYLTRYTDTSSVKAFSNNKALVKFAIKDIPQEQILRYYNSCFGASERYYNDGMSDKLVEAIGKINLMQFNGVIQQADRNMLPEEKKKANAQKEKYKSIIRLYLTVCYLFFKNLVYVNSRYYSAFYNLEKDRSLFEINGELKPTGKFDEGHYTGLVKLFIDNGWINPRASAYLTVNLANSDETAIRTFRNTAEHLEALRNADKYLNDLKQFDSYFEIYHYITQRNIKEKCEMLKEQTVKYNNDLLKYHGYSKDFVKALCVPFGYNLPRFKNLSIDALFDKNDKREKLKKGFED

SEQ ID NO: 99 - protein, 1023 aa, Unknown
  contig emb OHCP01000044.1
MAKKITAKQKREEKERLNKQKWAKNDSVIIVPETKEEIKTGEIQDNNRKRSRQKSQAKAMGLKAVLSFDNKIAIASFVSSKNAKSSHIERITDKEGTTISVNSKMFESSVNKRDINIEKRITIEEPQQDGTIKKEEKGVKSTTCNPYFKVGGKDYIGIKEIAEEHFFGRAFPNENLRVQIAYNIFDVQKILGTFVNNIIYSFYNLSRDEVQSDNDVIGMLYSISDYDRQKETETFLQAKSLLKQTEAYYAYFDDVFKKNKKPDKNKEGDNSKQYQENLRHNFNILRVLSFLRQICMHAEVHVSDDEGCTRTQNYTDSLEALFNISKAFGKKMPELKTLIDNIYSKGINAINDEFVKNGKNNLYILSKVYPNEKREVLLREYYNFVVCKEGSNIGISTRKLKETMIAQNMPSLKEENTYRNKLYTVMNFILVRELKNCATIREQMIKELRANMDEEEGRDRIYSKYAKEIYLYVKDKLKLMLNVFKEEAEGIIIPGKEDPVKFSHGKLDKKEIESFCLTTKNTEDITKVIYFLCKFLDGKEINELCCAMMNKLDGISDLIETAKQCGEDVEFVDQFKCLSKCATMSNQIRIVKNISRMKKEMTIDNDTIFLDALELLGRKIEKYQKDKNGDYVKDEKGKKVYTKDYNNFQDMFFEGKNHRVRNFVSNNVIKSKWFSYVVRYNKPAECQALMRNSKLVKFALDELPDSQIEKYYISVFGEKSSSSNEEMRRELLKKLCDFSVRGFLDEIVLLSEDEMKQKDKFSEKEKKKSLIRLYLTIVYLITKSMVKINTRFSIACATYERDYILLCQSEKAERAWEKGATAFALTRKFLNHDKPTFEQYYTREREISAMPQEKRKELRKENDQLLKKTHYSKHAYCYIVDNVNNLTGAVANDNGRGLPCLSEKNDNANLFLEMRNKIVHLNVVHDMVKYINEIKNITSYYAFFCYVLQRMIIGNNSNEQNKFKAKYSKTLQEFGTYSKDLMWVLNLPFAYNLPRYKNLSNEQLFYDEEERMEKIVGRKNDSR

SEQ ID NO: 100 - protein, 926 aa, Unknown
  contig emb OGDF01008514.1
MTETKPKREDIAKTPAAKSRSKAAGLKSTFAVNGSVLLTSFGRGNDAVPEKLITEKAVSEINTVKPRFSVEKPATSYSSSFGIKSHISATADNPLAGRAPVGEDAIHAKEVLEQRVFGKTFSDDNIHIQLIYNILDIRKILSTYANNVVFTINSMRRLDEYDREQDYLGYLYTGNSYERLLDIADKYAVDGEDWRNTAAGISNDFEKKQFQTINGFWDLLDMIEPYMCYFSEAFFCETTVKDPDSGRIVPCLEQRSDGDIYNILRILSIVRQTCMHDNASMRTVMFTLGQNSVRDRKNGFDELAELLDYLYDEKIDIVNRDFLRNQKNNIELLSRIYGSSADSPERDRLVQNFYDFRVLSQDKNLGFSIKKLREKLLDSPALSVVRSKKYDTMRSKIYSLIDFMIYRKFSENHVAVDDFVEELRSLLTEDEKESAYSRWAETLINDGFAQEILVKLLPQTDPAVIGKIKGKKLLNDSIAGIKLKKDASFFTKIINVLCMFQDGKEINELVSSLVNKFANIQSFVDVMRSQGIDSGFTADYAMFAESGRISRELHILKGIARMQHSIAGLGDVKIYGSDDKFHGVSRRVYTDAAYILGFGERSEDNDGYVDDYVSSKLLGGADKNLRNFITNNVIKNRRFLYTVRYMNPKRAKKLVQNDALVVLALSGIPETQIDRYYKSCIEKRSFNPDLNEKIAALSEMITTLKIDDFEDVKQNPEKNANYEAKKNQRISKERYKACIGLYLTVLYLICKNLVKINARYSIAIGCLERDTQLHGVDFKGAAYMTRDVFIAKGWINPKKPTVKSIKEQYAFLTPYIFTTYRNMIAHLAAVTNAYKYIPQMDRFKSWFHLYHTVIQHSLIQQYEYDRDYGRKGAPVVSERVLQLLEQCREHSNYSRDLLHILNLPFGYNLPRYLNLSSEKYFDANAI

SEQ ID NO: 101 - protein, 1030 aa, Unknown
  contig emb OGPN01002610.1
MAKKITAKQKREEKERLNKQKWAKQDTPVVPKSKTEEKPVAASDDKLLKTTQVKKVQTKSKAKAMGLKTVLSFDDKIAIASFVNDKKTKLPHIERITDKSGTTIHENARMFDSSVDEQNVNIEKRMTIEEKQNDGTFKKDEKDVKATICNPYFKTCGKDYIGIKDVAEKYFFGKTFPNENLRVQIAYNVFDIQKILGTYVNNIIYSFYNLRRDGKSDVDIIGSLYAFADFDNQLKDKPAFREAKDLLKNTEAYFSYFGDVFKKSKKGKKDENNEDYEKNLRHNFNVLRVLSFLRQICTHAYVKCTGGAKNNGDSTKVEAESLDALFNITEYFAKTAPELSKTINEIYKEGIDRINNDFVTNGKNNLYILSKVYPDMQRNELVKKYYQFVVCKEGNNVGINTRKLKESIISQHPWITTPQDNNKANDYESCRHKLYTIMCFILVAELDAHESIRDNMVAELRANMDGDDGRDAIYEKYAKDIYHIVKDKLLAMQKVFDEELVPVKVEGKNDPQQFTHGKLGKKEIESFCLSDKNTSDIAKVVYFLCNFLDGKEINELCCAMMNKFDGIGDLIDTAKQCGEEVKFIEEFACLSNCRKITNDIRVAKSISKMKNKVNIDNDIIYLDAIELLGRKIEKYQKDENGKILLGTDGKRLYTQEYKYFNDMFFNAGNHKVRNFIANNVMQSKWFFYVVRYNKPAECQIIMRNKTLVKFTLDDLPDMQIQRYYSSVFGDNNMPAVDEMRKRLLDKINQFSVRGFLDELDEIVLMSDEESKRNKSSEKEQKKSLIRLYLTIAYLITKSMVKINTRFSIACAMYERDYALLCQSEMKGGPWDGGAQALAVTRKFLNHDREVFDRYCAREAEIARLPSEERKPLRKANDKLLKQTHYTNHSYTYIVNNLNSFTDIDYCAKDVGLPAPNDKNDNASILGEMRNDIAHLNIVHDMVKYIEELKDISSYYAFYCYVLQRRLVGKDPNCQNKFKAKYAKELNDYGTYNKNLMWMLNLPFAYNLPRYKNLSSEFLFYDMEYNKKDDE

SEQ ID NO: 102 - protein, 1027 aa, Unknown
  contig emb OBLI01020244
MAKKITAKQRREERERQNKQKWAKKQADATAVFECEADIKPADSKDEDCTNIYIKREKKKTQAKAMGLKTVLGFDNKIAIASFMSSKDSKSSHIERITDPNGKTIREDVRMFDSNVDECSINLEKRMTVEERQKDGTIKKDEKDVKSTICNPYSNECGKDYIGIKSVAEELFFGRTFPNDNLRVQIAYNIFDIQKILGTYINNIIYSFYNLSRDESQSDNDVIGTLYMLKDFDGQKETDTFRQARALLERTEAYYSYFDNVFKKIDKNKKKSDDCKRERNEILRYNFNVLRVLSFLRQICAHAQVKISNEHDREKGGGLVDSLDALFNISRFFDAVAPELNEVINSVYSKGIDDINDNFVKNGKNNFYILSKIYPEVAREDLLREYYYFVVSKEGNNIGISTKKLKEAIIVQDMSYIKSEDYDTYRNKLYTVLCFILVKELNERTTIREQMVADLRANMNGDIGREDIYSKYAKIIYAQVKPRFDTMKSAFEEEAKDVIVPDKKKPVKFSHGKLDKNEIERFCITSANTDSVAKIIYFLCKFLDGKEINELCCAMMNKLDGINDLIETAEQCGAKVEFVDKFSVLSNCETISDQIRIVKSISKMKKEIAIDNDTIFLDALELLGRKIDKYKKDATGKYLKDENGKYLYSKEYDDFQYMFFKDSHRVRNFISNSVIKSKWFSYIVRYNQPSECRAIMKNKTLVKFALDELPDLQIQRYFVALYGDEDLPSYGEMRKILLKKLHDFSIKGFLDEIVLLSDLDMESQDKYCEKEQKKSLFRLYLTIAYLITKSMVKINTRFSIACATYERDYALLCASNKQERAWSSGATALALTRRFLNQDKLIFEKHYAREGEISKLPKEERKAMRKVNDQLLKRTHFSKHSYCYIVDNVNRLTGGECRTDKRVLPVLNEKNDNAGILLDFRKTIAHLNVVHKMVDYVDEIKGITSYYAFFCYVLQRMLVGNNLNEKNAIKEKYSATVKSFGTYSKDFMWLINLPFAYNLPRYKNLSNEQLFYDEEERNETEEQIDRL

SEQ ID NO: 103 - protein, 961 aa, Unknown
  contig OIZX01000427.1
MAKKKKTARQLREEMQQQRKQAIQKQQEQRQEKAAAARETAAPEQPAAAPVPKRQRKSLAKAAGLKSNFILDPQRRTTVMTAFGQGSTAILEKQIVDRAISDLQPVQQFQVEPASAAKYRLKNSRVRFPNVTADDPLYRRKDGGFVPGMDALRRKNVLEQRFFGKSFADNIHIQMIYSILDIHKILAAASGHIVHLLNIVNGSKDRDFIGMLAAHVLYNELNEEAKRSIADFCKSPRLIYYSAAFYETLDNGKSERRSNEDIFNILALMTCLRNFSSHHSIAIKVKDYSAAGLYNLRRLGPDMKKMLDTFYTEAFIQLNQSFQDHNTTNLTCLFDILNISDSARQKQLAEEFYRYVVFKEQKNLGFSVRKLREEMLLLPDAAVIADKRYDTCRSKLYNLMDFLILRVYRTGRADRCDKLPEALRAALTDEEKAVVYHKEALSLWNEMRTLILDGLLPQMTPENLSRLSGQKRKGELSLDDAMLKECLYEPGPVPEDAAPEEANAEYFCRMIYLATLFMDGKEINTLLTTLISKFENIAAFLQTMEQLNIEAELGPEYAMFTRSRAVAEQLRVINSFALMKKPQVNAKQQLYRAAVTLLGTEDPDGVTDEMLCIDPVTGKMLPPNQRHHGDTGLRNFIANNVVESRRFQYLIRYSDPAQLHQLASNKKLVRFVLSSIPDTQINRYYETCGQTRLAGRAAKVEFLTDMIAAIRFDQFRDVNQKERGANTQKERYKAMLGLYQTVLYLAVKNLVNINARYVMAFHCVERDMFLYDGELTDPKGESVSAFLAVNGKKGVQPQYLLLTQLFIRRDYLKRSACEQIQHNMENISDRLLREYRNAVAHLNVIAHLADYSADMREITSYYGLYHYLMQRHLFKRHAWQIRQPERPTEEEQKLIEQEQKQLAWEKALFDKTLQYHSYNKDLVKALNAPFGYNLARYKNLSIEPLFSKEAAPAAEIKATHA

SEQ ID NO: 104 - protein, 911 aa, Unknown
  contig OCTW011587266.1
MKQNDRENNNKIKKSAAKAVGVKSLARLSDGSTVVSSFGKGAAAELESLITGGEIRKLSDKAILEITDDTQNKNAYNVKSSRIPNLTARTDKLSDKSGMDDLGFKRELELEVFGQCFDDSIHIQIAHAVFDIQKSLAAVIPNVLYTLNNLDRSYSTDNTSDKKDIIGNTLNYQHSYESFNVEKRGEFTEYYNAAKDRFSYFPDILCVLEKVNGKDRYQPKSEKDAFNVLSSVNMLRNSLFHFAPKSNDGKARIAVFKNQFDSDFSHITSTVNKIYSAKIAGVNENFLNNEGNNLYIILKATNWDIKKIVPQLYRFSVLKSDKNMGFNMRKLREFAVESKNIDLSRLNDKFLTNNRKKLYKVIDFIIYYHLNKVLKDSFVDDFVAALRASQSEEEKEKLYAQYSERLFADEGLKSAIKKAVDMISDTKSNIFKMKTPLDKALIENIKVNSDASDFCKLIYVFTRFLDGKEINILLNSLIKKFQDIHSFNTTVKKLSENNLIINADYVDDYSLFEQSGTVARELMLIKSISKMDFGLDNINLSFMYDDALRTLGVSDENLPEVKREYFGKTKNLSAYIRNNVLENRRFKYVIKYIHPSDVQKIACNKAIAGFVLNRMPDTQIKRYYDSLINKGATDIQAQAKALLDCITGISFDAIKDDKHLHKSKEKSPQRSADRERKKAMLTLYYTIVYIFVKQMLHINSLYTIGFFYLERDQRFIYSRAKKENKNPSKNSYLNDFRSVTAYFIPSEIMKRIEKNENKGFLEDFEALWNSCGKTSRLRKEDVLLYARYISPDHALKNYKMILNSYRNKIAHINVIMSAGKYTGGIKRMDSYFSVFQHLVQCDILSNPNNKGKCFESESLKPLLLDMKFDGTDEKLYSKRLTRALNIPFGYNVPRYKNLTFEKIYLKSSINE

SEQ ID NO: 105 - protein, 904 aa, Unknown
  contig emb OGNF01009141.1
MADIDKKKSSAKAAGLKSTFVLENNKLLMTSFGNGNKAVIEKIIDEKVDSINEPEVFSVTPCDKKFELQPAKRGLAADSLVDNPLKSKKTAGDDAIHSRKFLERQFFDGNTFNDNIHIQLIYNILDIEKILSVHVNDIVYSVNNILSRGEGMEYNDYIGTLNLKSFETYKNNLVNKKKFDLDRVKKIPQLAYFGSAFYNTPEDTSAKITKTKIKSNEEIYYTFMLLSTARNFSAHYLDRNRAKSSDAEDFDGTSVIMYNLDNEELYKKLYNKKVHMALTGMKKVLDANFNKKVEHLNNSFIKNSAKDFVILCEVLGIKSRDEKTKFVKDYYDFVVRKNYKHLGFSVKELRELLFANHDSNKYIKEFDKISNKKFDSVRSRLNRLADYIIYDYYNKNNAKVSDLVKYLRAAADDEQKKKIYLNESINLVKSGILERIKKILPKLNGKIIGNMQPDSTITASMLHNTGKDWHPISENAHYFTKWIYTLTLFMDGKEINDLVTTLINKFDNIASFIEVLKSQSVCTHFSEERKMFIDSAEICSELSAMNSFARMEAPGASSKRAMFVEAARILGDNRSKEELEEYFDTLFDKSASKKEKGFRNFIRNNVVDSNRFKYLTRYTDTSSVKAFSNNKALVKFAIKDIPQEQILRYYNSCFGASERYYNDGMSDKLVEAIGKINLMQFNGVIQQADRNMLPEEKKKANAQKEKYKSIIRLYLTVCYLFFKNLVYVNSRYYSAFYNLEKDRSLFEINGELKPTGKFDEGHYTGLVKLFIDNGWINPRASAYLTVNLANSDETAIRTFRNTAEHLEALRNADKYLNDLKQFDSYFEIYHYITQRNIKEKCEMLKEQTVKYNNDLLKYHGYSKDFVKALCVPFGYNLPRFKNLSIDALFDKNDKREKLKKGFED

SEQ ID NO: 106 - protein, 933 aa, Unknown
  contig emb OIEN01002196.1
MERQKRKMKSKSKMAGVKSVFVIGDELLMTSFGDGDDAVLEKDIDENGVVNDCRNPAAYDAVYGTDSIRVKKTNNNIRAKVNNPLAKSNIRSEESALFRTRVNEYKREQKDKYETLFFGKTFDDNIHIQLISKILDIEKTFSVVIGNIVYAINNLSLEQSIDRPIDIFGDKNTQGISLREDNDYLKTMLPRCEYLFHNILNSDSDNNSKMNYNKVNKGKEEKDNRNNENIEKLKKALEVIKIIRVDSFHGVDGIKGDQKFPRSKYNLAVNYNEEIQKTISEPFNRKVEEVQQDFYRNSCVNIDFLKEIMYGSNYTDRGSDSLECSYFNFAILKQNKNMGFSITSIRECLLDLYELNFESMQNLRPRANSFCDFLIYDYYCKNESERANLVDCLRSAASEEEKKNIYFQTAERVKEKFRNAFNRISRFDASYIKNSREKNLSGGSSLPKYSFIEGFTKRSKKINDNDEKNADLFCNMLYYLAQFLDGKEINIFLTSIHNIFQNIDSFLKVMKEKGMECKFQKDFKMFSHAGHVAKKIEIVISLAKMKKTLDFYNAQALKDAVTILGVSKKHQYLDMNSYLDFYMFDNRSGATGKNAGKDHNLRNFLVSNVIRSRKFNYLSRYSNLAEVKKLAQNPSLVQFVLSRIEPSLICRYYESSQGISSEGITIDEQIKKLTGIIVDMNIDSFENINNGEIGMRYSKATPQSIERRNQMRVCVGLYLNVLYQIEKNLMNVNARYVLAFAFAERDALMLNFTLEECKKNKKRSSGGFSFIEMTQFFIDKKLFKVATEAIKKNVLKYNGNPESLNHIPGEYICKNMEGYHENTVRNFRNMVAHLTAVARVPLYISEVTQIDSYYALYHYCMQMNILQGIEQSGKILDNIKLKNALENARVHRTYSKDAVKYLCLPFAYNISRYKALTIKDLFDWTEYSCKKDE

SEQ ID NO: 107 - protein, 1034 aa, Unknown; identical to SEQ ID NO: 46
  contig e-k87 11092736

SEQ ID NO: 108 - DNA, 30 bp, Unknown; identical to SEQ ID NO: 47
  CasRX/Cas13d Direct repeat 1

SEQ ID NO: 109 - protein, 973 aa, Unknown
  CasRX/Cas13d Ga0129306 1000735
MQKQREQQTVTDESERKKKPLKSGAKAAGLKSVFVLSEGKELLTSFGRGNEAVPEKRVTGGTIANARTDNKEAFSAALQNKRFEVFGRTAGSSDDPLAVSRAPGQDLIGAKTALEERYFGRAFADNIHMQVIYAIQDINKILAVHANNIVYTLNNLDREADPETDDFIGSGYLTLKNTFETYCDPAALNEREREKVTVSKQHFDAFMQNPRLAYYGNAFFRKLSKAERLARGREIFDKESPERRQEILGSRGKNKSVDDEIRALAPEWVKREERDVYSELVLMSELRQSCFHGQQKNSARIFRLDNDLGPGVDGARELLDRLYAEKINDLRSFDKTSASSNFRLLFNAYHADNEKKKELAQEFYRFSVLKVSKNTGFSIRTLREKIIEDHAAQYRDKIYDSMRKKLFSTFDFFLWRFYEEREDEAEELRACLRAARSDEEKEQIYAEAAASCWPSVKPFVESVAATLCDVVKGRTKLNKLKLSADESTLVRNAIDGVRISPRASYFTKLIYLMTLFLDGKEINDLLTTLIHAFENIDSFLSVLGSERLERTFDANYRIFADSGVIAQELRAVNSFARMTTEPFNSKLVMFEDAAQLFGMSGGLVEHAEELREYLDNKMLDKTKLRLLPDGKVDTGFRNFIISNVTESRRFRYLVRYCEPRAVRDYMSCRPLIRLTLRDMPDTILRRYYEQSVGAATVDRERILDTLADKLLSLRFTDFENVNQRANAERNREKQKMMGIISLYLNVAYQIVKNLVYVNARYTMAYHCAERDTELLLNAAGEGNLLRRDRSWPARLHLPRRALARRRDRVEVMERDVARGPEAYNRDEWLGLVRTLRREKRVCDNLHNNYAYLCGADAEPGDASLSLLFVYRNKAAHLSVLNKGGRLSGDLKEAKSWFYVYHFLMQRVLEEEFRNTQALPERLRELLMMAERYRGCSKDLIKVLNLTFAYNLPRYKNLSIDGRFDKNHPDPSDE

SEQ ID NO: 110 - protein, 854 aa, Unknown
  CasRX/Cas13d  Ga0129317 1008067
MKKQKKSLVKAAGLKSAFVVGDSVYLTSFGKGNAARLDTKINPDNSTERYVSDSEKHTLKINSITDTELRLSGPFPKQAEAKNPTHKKDNEQKNTRQDMLGLKSTLEKFYFGSTFDDNIHIQIIHNIQDIAKILAAHSNNAGYALDNMLAYQGVEFSDMIGYMGTSRTFDNYDPNHKNNKDFFRFLKLPRLGYFGSAFYSQKGKDFEKRSDEEVYNICALMGQIRQCCFHGKQEKYQLKWLYNFHNFKSNKPFLDTLDKHFDEMIDRINKNFIKNNTPDLIILSGLYPDMAKKELVRLFYDFTTVKEYKNMGFSVKKLREKMLESEEASDFRDKDYDSVRRKLYKLMDFCIYYLYYSDSERNENLVSRLRESLTDENKDIIYSKEAKIVWNELRKKFSTILDNVKGSNIKKLENVKEKFISEDEFDDIKLDIDISYFSKLMYVMCYFLDGKEINDLLTTLVSKFDNIGSIIEAATQIGINIEFIDDFKFFDRSKDISVELNIIRNFARMQAPVPNAKRAMQEDAIRILGGSEEDIFSILDDMTGYDKSGKKLAQSKKGFRNFIINNVVESSRFKYIVRYSNPQKIRKLANNSVVVGFVLGKLPDAQIESYFNSCLPNRVYSTPDKARESLRDMLHNISFNDFADVKQDDRRATPEEKVEKERYKAIIGLYLTVMYHLVKNLVYVNSRYVMAFHCLERDAMHYDVSLDNYRDLIRHLISEGDSSCNHFISHNRRMRDCIEENVKNSEQLIFGKEDAVIRFRNNVAHLSAIRNANEYIGDIREITSYFALYHYLMQRKLIDDCKVNDTAHKYFEQLTKYKTYVMDMVKALCSPFGYNLPRFKNLSIEGKFDMHESK

SEQ ID NO: 111 - protein, 965 aa, Unknown
  CasRX/Cas13d Ga0224415 10048792
MSKKENRKSYVKGLGLKSTLVSDSKVYLTTFADGSNAKLEKCVENNKIICISNDKEAFAASIANKNVGYKIKNDEKFRHPKGYDIISNNPLLHNNSVQQDMLGLKNVLEKRYFGKSSGGDNNLCIQIIHNIIDIEKILSEYIPNVVYAFNNIAGFKDEHNNIIDIIGTQTYNSSYTYADFSKDKSDKKYIEFQKLLKNKRLGYWGKAFFTGQGNNAKVRQENQCFHIIALLISLRNWATHSNELDKHTKRTWLYKLDDTNILNAEYVKTLNYLYDTIADELTKSFSKNGAVNVNYLAKKYNIKDDLPGFSEQYFRFSIMKEQKNLGFNISKLRENMLDFKDMSVIRDDHNRYDKDRSKIYTMMDFVIYRYYIDNNNDSIDFINKLRSSIDEKSKEKLYNEEANRLWNKLKEYMLYIKEFNGKLASRTPDRDGNISEFVESLPKIHRLLPRGQKISNFSKLMYLLTMFLDGKEINDLLTTLINKFENIQGFLDIMPEINVNAKFEPEYVFFNKSHEIAGELKLIKGFAQMGEPAATLKLEMTADAIKILGTEKEDAELIKLAESLFKDENGKLLGNKQHGMRNFIGNNVIKSKRFHYLIRYGDPAHLHKIATNKNVVRFVLGRIADMQKKQGQKGKNQIDRYYEVCVGNKDIKKTIEEKIDALTDIIVNMNYDQFEKKKAVIENQNRGKTFEEKNKYKRDNAEREKFKKIISLYLTVIYHILKNIVNVNSRYILGFHCLERDKQLYIEKYNKDKLDGFVALTKFCLGDEERFEDLKAKAQASIQALETANPKLYAKYMNYSDEEKKEEFKKQLNRERVKNARNAYLKNIKNYIMIRLQLRDQTDSSGYLCGEFRDKVAHLEVARHAHEYIGNIKEVNSYFQLYHYIMQCRLYDVLKNNTKAEAMVKGKAKEYFEALEKEGTYNDKLLKIACVPFGYCIPRYKNLSMEELFDMNEEKKFKKKAPENT

SEQ ID NO: 112 - protein, 1022 aa, Unknown; identical to SEQ ID NO: 48
  CasRX/Cas13d 160582958  gene49834

SEQ ID NO: 113 - protein, 36 aa, Unknown
  CasRX/Cas13d DR
GAACTACACCCCTCTGTTCTTGTAGGGGTCTAACAC

SEQ ID NO: 114 - protein, 998 aa, Unknown
  CasRX/Cas13d 250twins 35838 GL0110300
MGNKQRVSAQKRRENAKLCNQQKARQAESQRDKIKNMNVEKMKNINTNDIKHTKTTAKKLGLKSTIIADKKIILTSFINEQSSKTANIEKVAGFKGDTIDTISYTPRMFRSEINPGEIVISKGDDLSEFANPANFPIGRDYVKIRSALEKQYFGKEFPEDNLHVQIAYNVADIKKILSVYINNIIYMFYNLARSEEYDIFYNSQSENSGRDCDVIGSLYYQASYRNQDANRFEKDGKKKAIDSLLDDTRAYYTYFDGLFSVPKREDDGKIKESEKEKAKDQNFDVLRLLSVGRQLTFHSDKSNNEAYLFDLSKLTRAAQDENRRQDIQSLLNILNSTCRSNLEGVNGDFVKHAKNNLYVLNQLYPSLKANDLIGEYYNFIVKKENRNIGIRLITVRELIIEHNYTNLKDSKYDTYRNKIYTVLNFILFREIQENSIAIKNFREKLRSTEKAEQPALYQAFANKIYPMVQAKFAKAIDLFEEQYKTKFKSEFKGGISIENMQQQNILLQTENIDYFSKYVLFLTKFLDGKEINELLCALINKFDNIADLLDISKQIGTPVVFCADYESLNDAAKIAENIRLIKNIAHLRPAIQEAQSSKDNADAAGTPATLLIDAYNMLNTDIQLVYGEAAYEELRKDLFERKNGTKYNKKGKKVDVYDHKFRNFLINNVIKSKWFFYIAKYVKPADCAKMMSNKKMIEFALRDLPETQIKRYYYTITGNEALGDAESLKGVIIEQLHAFSIKNTLLSIKNMGEGEYKIQQIGSSKEKLKAIVNLYLTVAYLLTKSLVKVNIRFSIAFGCLERDLVLQKKSEKKFDAIINEILLEDDKIRKECDKERAQAKTLPRELAQERFAQIKRRESGCYFKSYHVYDYLSKNSNEFKQNHIDFAVTSYRNNVEHLNVVHCMTKYFSEVKDVKSYYGVYCYIMQRMLCDELIIKNQDKPDVRQTFEEYNRLLKDHGTYSKNLMWLLNFPFAYNLARYKNLSNEDLFNAKNNDQKSK

SEQ ID NO: 115 - protein, 1020 aa, Unknown
  CasRX/Cas13d 250twins 36050 GL0158985
MKKKHQSAAEKRQVKKLKNQEKAQKYASEPSPLQSDTAGVECSQKKTVVSHIASSKTLAKAMGLKSTLVMGDKLVITSFAASKAVGGAGYKSANIEKITDLQGRVIEEHERMFSADVGEKNIELSKNDCHTNVNNPVVTNIGKDYIGLKSRLEQEFFGKTFENDNLHVQLAYNILDIKKILGTYVNNIIYIFYNLNRAGTGRDERMYDDLIGTLYAYKPMEAQQTYLLKGDKDMRRFEEVKQLLQNTSAYYVYYGTLFEKVKAKSKKEQRAKEAEIDACTAHNYDVLRLLSLMRQLCMHSVAGTAFKLAESALFNIEDVLSADLKEILDEAFSGAVNKLNDGFVQHSGNNLYVLQQLYPNETIERIAEKYYRLTVRKEDLNMGVNIKKLRELIVGQYFPEVLDKEYDLSKNGDSVVTYRSKIYTVMNYILLYYLEDHDSSRESMVEALRQNREGDEGKEEIYRQFAKKVWNGVSGLFGVCLNLFKTEKRNKFRSKVALPDVSGAAYMLSSENIDYFVKMLFFVCKFLDGKEINELLCALINKFDNIADILDAAAQCGSSVWFVDSYRFFERSRRISAQIRIVKNIASKDFKKSKKDSDESYPEQLYLDALALLGDVISKYKQNRDGSVVIDDQGNAVLTEQYKRFRYEFFEEIKRDESGGIKYKKSGKPEYNHQRRNFILNNVLKSKWFFYVVKYNRPSSCRELMKNKEILRFVLRDIPDSQVRRYFKAVQGEEAYASAEAMRTRLVDALSQFSVTACLDEVGGMTDKEFASQRAVDSKEKLRAIIRLYLTVAYLITKSMVKVNTRFSIAFSVLERDYYLLIDGKKKSSDYTGEDMLALTRKFVGEDAGLYREWKEKNAEAKDKYFDKAERKKVLRQNDKMIRKMHFTPHSLNYVQKNLESVQSNGLAAVIKEYRNAVAHLNIINRLDEYIGSARADSYYSLYCYCLQMYLSKNFSVGYLINVQKQLEEHHTYMKDLMWLLNIPFAYNLARYKNLSNEKLFYDEEAAAEKADKAENERGE

SEQ ID NO: 116 - protein, 128 aa, Artificial Sequence
  RNase1(K41R)
KESRAKKFQRQHMDSDSSPSSSSTYCNQMMRRRNMTQGRCRPVNTFVHEPLVDVQNVCFQEKVTCKNGQGNCYKSNSSMHITDCRLTNGSRYPNCAYRTSPKERHIIVACEGSPYVPVHFDASVEDST

SEQ ID NO: 117 - protein, 128 aa, Artificial Sequence
  RNase1 (RNase1(K41R, D121E))
KESRAKKFQRQHMDSDSSPSSSSTYCNQMMRRRNMTQGRCRPVNTFVHEPLVDVQNVCFQEKVTCKNGQGNCYKSNSSMHITDCRLTNGSRYPNCAYRTSPKERHIIVACEGSPYVPVHFEASVEDST

SEQ ID NO: 118 - protein, 128 aa, Artificial Sequence
  RNase1 (RNase1(K41R, D121E, H119N))
KESRAKKFQRQHMDSDSSPSSSSTYCNQMMRRRNMTQGRCRPVNTFVHEPLVDVQNVCFQEKVTCKNGQGNCYKSNSSMHITDCRLTNGSRYPNCAYRTSPKERHIIVACEGSPYVPVNFEASVEDST

SEQ ID NO: 119 - protein, 128 aa, Artificial Sequence
  (RNase1(H119N))
KESRAKKFQRQHMDSDSSPSSSSTYCNQMMRRRNMTQGRCKPVNTFVHEPLVDVQNVCFQEKVTCKNGQGNCYKSNSSMHITDCRLTNGSRYPNCAYRTSPKERHIIVACEGSPYVPVNFDASVEDST

SEQ ID NO: 120 - protein, 128 aa, Artificial Sequence
  (RNase1(R39D, N67D, N88A, G89D, R91D, H119N))
KESRAKKFQRQHMDSDSSPSSSSTYCNQMMRRRNMTQGDCKPVNTFVHEPLVDVQNVCFQEKVTCKDGQGNCYKSNSSMHITDCRLTADSDYPNCAYRTSPKERHIIVACEGSPYVPVNFDASVEDST

SEQ ID NO: 121 - protein, 128 aa, Artificial Sequence
  RNase1 (RNase1(R39D, N67D, N88A, G89D, R91D, H119N, K41R, D121E))
KESRAKKFQRQHMDSDSSPSSSSTYCNQMMRRRNMTQGDCRPVNTFVHEPLVDVQNVCFQEKVTCKDGQGNCYKSNSSMHITDCRLTADSDYPNCAYRTSPKERHIIVACEGSPYVPVNFEASVEDST

SEQ ID NO: 122 - protein, 128 aa, Artificial Sequence
  RNase1 (RNase1(R39D, N67D, N88A, G89D, R91D))
KESRAKKFQRQHMDSDSSPSSSSTYCNQMMRRRNMTQGDCKPVNTFVHEPLVDVQNVCFQEKVTCKDGQGNCYKSNSSMHITDCRLTADSDYPNCAYRTSPKERHIIVACEGSPYVPVHFDASVEDST

SEQ ID NO: 123 - protein, 311 aa, Unknown
  Endonuclease III-like protein 1 (NTHL)
CSPQESGMTALSARMLTRSRSLGPGAGPRGCREEPGPLRRREAAAEARKSHSPVKRPRKAQRLRVAYEGSDSEKGEGAEPLKVPVWEPQDWQQQLVNIRAMRNKKDAPVDHLGTEHCYDSSAPPKVRRYQVLLSLMLSSQTKDQVTAGAMQRLRARGLTVDSILQTDDATLGKLIYPVGFWRSKVKYIKQTSAILQQHYGGDIPASVAELVALPGVGPKMAHLAMAVAWGTVSGIAVDTHVHRIANRLRWTKKATKSPEETRAALEEWLPRELWHEINGLLVGFGQQTCLPVHPRCHACLNQALCPAAQGL

SEQ ID NO: 124 - protein, 372 aa, Homo Sapiens
MESGQPARRIAMAPLLEYERQLVLELLDTDGLVVCARGLGADRLLYHFLQLHCHPACLVLVLNTQPAEEEYFINQLKIEGVEHLPRRVTNEITSNSRYEVYTQGGVIFATSRILVVDFLTDRIPSDLITGILVYRAHRIIESCQEAFILRLFRQKNKRGFIKAFTDNAVAFDTGFCHVERVMRNLFVRKLYLWPRFHVAVNSFLEQHKPEVVEIHVSMTPTMLAIQTAILDILNACLKELKCHNPSLEVEDLSLENAIGKPFDKTIRHYLDPLWHQLGAKTKSLVQDLKILRTLLQYLSQYDCVTFLNLLESLRATEKAFGQNSGWLFLDSSTSMFINARARVYHLPDAKMSKKEKISEKMEIKEGEGILWG

SEQ ID NO: 125 - protein, 287 aa, Homo Sapiens
PKRGKKGAVAEDGDELRTEPEAKKSKTAAKKNDKEAAGEGPALYEDPPDQKTSPSGKPATLKICSWNVDGLRAWIKKKGLDWVKEEAPDILCLQETKCSENKLPAELQELPGLSHQYWSAPSDKEGYSGVGLLSRQCPLKVSYGIGDEEHDQEGRVIVAEFDSFVLVTAYVPNAGRGLVRLEYRQRWDEAFRKFLKGLASRKPLVLCGDLNVAHEEIDLRNPKGNKKNAGFTPQERQGFGELLQAVPLADSFRHLYPNTPYAYTFWTYMMNARSKNVGWRLDYFLLS

SEQ ID NO: 126 - protein, 213 aa, Homo Sapiens
EALFFPSQVTCTEALLRAPGAELAELPEGCPCGLPHGESALSRLLRALLAARASLDLCLFAFSSPQLGRAVQLLHQRGVRVRVVTDCDYMALNGSQIGLLRKAGIQVRHDQDPGYMHHKFAIVDKRVLITGSLNWTTQAIQNNRENVLITEDDEYVRLFLEEFERIWEQFNPTKYTFFPPKKSHGSCAPPVSRAGGRLLSWHRTCGTSSESQT

SEQ ID NO: 127 - protein, 382 aa, Homo Sapiens
KARYKTLEPRGYSLLIRGLIHSDRWREALLLLEDIKKVITPSKKNYNDCIQGALLHQDVNTAWNLYQELLGHDIVPMLETLKAFFDFGKDIKDDNYSNKLLDILSYLRNNQLYPGESFAHSIKTWFESVPGKQWKGQFTTVRKSGQCSGCGKTIESIQLSPEEYECLKGKIMRDVIDGGDQYRKTTPQELKRFENFIKSRPPFDVVIDGLNVAKMFPKVRESQLLLNVVSQLAKRNLRLLVLGRKHMLRRSSQWSRDEMEEVQKQASCFFADDISEDDPFLLYATLHSGNHCRFITRDLMRDHKACLPDAKTQRLFFKWQQGHQLAIVNRFPGSKLTFQRILSYDTVVQTTGDSWHIPYDEDLVERCSCEVPTKWLCLHQKT

SEQ ID NO: 128 - protein, 360 aa, Homo Sapiens
SVEPMFRHLKNTYAGLQLVVVILPGKTPVYAEVKRVGDTVLGMATQCVQMKNVQRTTPQTLSNLCLKINVKLGGVNNILLPQGRPPVFQQPVIFLGADVTHPPAGDGKKPSIAAVVGSMDAHPNRYCATVRVQQHRQEIIQDLAAMVRELLIQFYKSTRFKPTRIIFYRDGVSEGQFQQVLHHELLAIREACIKLEKDYQPGITFIVVQKRHHTRLFCTDKNERVGKSGNIPAGTTVDTKITHPTEFDFYLCSHAGIQGTSRPSHYHVLWDDNRFSSDELQILTYQLCHTYVRCTRSVSIPAPAYYAHLVAFRARYHLVDKEHDSAEGSHTSGQSNGRDHQALAKAVQVHQDTLRTMYFA

SEQ ID NO: 129 - protein, 327 aa, Homo Sapiens
QGAEGALTGKQPDGSAEKAVLEQFGFPLTGTEARCYTNHALSYDQAKRVPRWVLEHISKSKIMGDADRKHCKFKPDPNIPPTFSAFNEDYVGSGWSRGHMAPAGNNKFSSKAMAETFYLSNIVPQDFDNNSGYWNRIEMYCRELTERFEDVWVVSGPLTLPQTRGDGKKIVSYQVIGEDNVAVPSHLYKVILARRSSVSTEPLALGAFVVPNEAIGFQPQLTEFQVSLQDLEKLSGLVFFPHLDRTSDIRNICSVDTCKLLDFQEFTLYLSTRKIEGARSVLRLEKIMENLKNAEIEPDDYFMSRYEKKLEELKAKEQSGTQIRKPS

SEQ ID NO: 130 - protein, 526 aa, Homo Sapiens
EHPSKMEFFQKLGYDREDVLRVLGKLGEGALVNDVLQELIRTGSRPGALEHPAAPRLVPRGSCGVPDSAQRGPGTALEEDFRTLASSLRPIVIDGSNVAMSHGNKETFSCRGIKLAVDWFRDRGHTYIKVFVPSWRKDPPRADTPIREQHVLAELERQAVLVYTPSRKVHGKRLVCYDDRYIVKVAYEQDGVIVSNDNYRDLQSENPEWKWFIEQRLLMFSFVNDRFMPPDDPLGRHGPSLSNFLSRKPKPPEPSWQHCPYGKKCTYGIKCKFYHPERPHHAQLAVADELRAKTGARPGAGAEEQRPPRAPGGSAGARAAPREPFAHSLPPARGSPDLAALRGSFSRLAFSDDLGPLGPPLPVPACSLTPRLGGPDWVSAGGRVPGPLSLPSPESQFSPGDLPPPPGLQLQPRGEHRPRDLHGDLLSPRRPPDDPWARPPRSDRFPGRSVWAEPAWGDGATGGLSVYATEDDEGDARARARIALYSVFPRDQVDRVMAAFPELSDLARLILLVQRCQSAGAPLGKP

SEQ ID NO: 131 - protein, 475 aa, Homo Sapiens
RQQQPQVVEKQQETPLAPADFAHISQDAQSLHSGASRRSQKRLQSPSKQAQPLDDPEAEQLTVVGKISFNPKDVLGRGAGGTFVFRGQFEGRAVAVKRLLRECFGLVRREVQLLQESDRHPNVLRYFCTERGPQFHYIALELCRASLQEYVENPDLDRGGLEPEVVLQQLMSGLAHLHSLHIVHRDLKPGNILITGPDSQGLGRVVLSDFGLCKKLPAGRCSFSLHSGIPGTEGWMAPELLQLLPPDSPTSAVDIFSAGCVFYYVLSGGSHPFGDSLYRQANILTGAPCLAHLEEEVHDKVVARDLVGAMLSPLPQPRPSAPQVLAHPFFWSRAKQLQFFQDVSDWLEKESEQEPLVRALEAGGCAVVRDNWHEHISMPLQTDLRKFRSYKGTSVRDLLRAVRNKKHHYRELPVEVRQALGQVPDGFVQYFTNRFPRLLLHTHRAMRSCASESLFLPYYPPDSEARRPCPGATGR

SEQ ID NO: 132 - protein, 384 aa, Homo Sapiens
KLVRKNIEKDNAGQVTLVPEEPEDMWHTYNLVQVGDSLRASTIRKVQTESSTGSVGSNRVRTTLTLCVEAIDFDSQACQLRVKGTNIQENEYVKMGAYHTIELEPNRQFTLAKKQWDSVVLERIEQACDPAWSADVAAVVMQEGLAHICLVTPSMTLTRAKVEVNIPRKRKGNCSQHDRALERFYEQVVQAIQRHIHFDVVKCILVASPGFVREQFCDYLFQQAVKTDNKLLLENRSKFLQVHASSGHKYSLKEALCDPTVASRLSDTKAAGEVKALDDFYKMLQHEPDRAFYGLKQVEKANEAMAIDTLLISDELFRHQDVATRSRYVRLVDSVKENAGTVRIFSSLHVSGEQLSQLTGVAAILRFPVPELSDQEGDSSSEED

SEQ ID NO: 133 - protein, 166 aa, Homo Sapiens
SLVIRNLQRVIPIRRAPLRSKIEIVRRILGVQKFDLGIICVDNKNIQHINRIYRDRNVPTDVLSFPFHEHLKAGEFPQPDFPDDYNLGDIFLGVEYIFHQCKENEDYNDVLTVTATHGLCHLLGFTHGTEAEWQQMFQKEKAVLDELGRRTGTRLQPLTRGLFGGS

SEQ ID NO: 134 - protein, 178 aa, Homo Sapiens
QEVIAGLERFTFAFEKDVEMQKGTGLLPFQGMDKSASAVCNFFTKGLCEKGKLCPFRHDRGEKMVVCKHWLRGLCKKGDHCKFLHQYDLTRMPECYFYSKFGDCSNKECSFLHVKPAFKSQDCPWYDQGFCKDGPLCKYRHVPRIMCLNYLVGFCPEGPKCQFAQKIREFKLLPGSKI

SEQ ID NO: 135 - protein, 384 aa, Homo Sapiens
KLVRKNIEKDNAGQVTLVPEEPEDMWHTYNLVQVGDSLRASTIRKVQTESSTGSVGSNRVRTTLTLCVEAIDFDSQACQLRVKGTNIQENEYVKMGAYHTIELEPNRQFTLAKKQWDSVVLERIEQACDPAWSADVAAVVMQEGLAHICLVTPSMTLTRAKVEVNIPRKRKGNCSQHDRALERFYEQVVQAIQRHIHFDVVKCILVASPGFVREQFCDYMFQQAVKTDNKLLLENRSKFLQVHASSGHKYSLKEALCDPTVASRLSDTKAAGEVKALDDFYKMLQHEPDRAFYGLKQVEKANEAMAIDTLLISDELFRHQDVATRSRYVRLVDSVKENAGTVRIFSSLHVSGEQLSQLTGVAAILRFPVPELSDQEGDSSSEED

SEQ ID NO: 136 - protein, 256 aa, Homo Sapiens
DPAWSADVAAVVMQEGLAHICLVTPSMTLTRAKVEVNIPRKRKGNCSQHDRALERFYEQVVQAIQRHIHFDVVKCILVASPGFVREQFCDYMFQQAVKTDNKLLLENRSKFLQVHASSGHKYSLKEALCDPTVASRLSDTKAAGEVKALDDFYKMLQHEPDRAFYGLKQVEKANEAMAIDTLLISDELFRHQDVATRSRYVRLVDSVKENAGTVRIFSSLHVSGEQLSQLTGVAAILRFPVPELSDQEGDSSSEED

SEQ ID NO: 137 - protein, 209 aa, Homo Sapiens
MDPGKDKEGVPQPSGPPARKKFVIPLDEDEVPPGVRGNPVLKFVRNVPWEFGDVIPDYVLGQSTCALFLSLRYHNLHPDYIHGRLQSLGKNFALRVLLVQVDVKDPQQALKELAKMCILADCTLILAWSPEEAGRYLETYKAYEQKPADLLMEKLEQDFVSRVTECLTTVKSVNKTDSQTLLTTFGSLEQLIAASREDLALCPGLGPQK

SEQ ID NO: 138 - protein, 128 aa, Homo Sapiens
KESRAKKFQRQHMDSDSSPSSSSTYCNQMMRRRNMTQGRCKPVNTFVHEPLVDVQNVCFQEKVTCKNGQGNCYKSNSSMHITDCRLTNGSRYPNCAYRTSPKERHIIVACEGSPYVPVHFDASVEDST

SEQ ID NO: 139 - protein, 123 aa, Homo Sapiens [sequence omitted]

SEQ ID NO: 140 - protein, 129 aa, Homo Sapiens
GLGLVQPSYGQDGMYQRFLRQHVHPEETGGSDRYCNLMMQRRKMTLYHCKRFNTFIHEDIWNIRSICSTTNIQCKNGKMNCHEGVVKVTDCRDTGSSRAPNCRYRAIASTRRVVIACEGNPQVPVHFDG

SEQ ID NO: 141 - protein, 375 aa, Homo Sapiens
  misc_feature (1)..(1): Xaa can be any naturally occurring amino acid
XSAVDNILLKLAKFKIGFLRLGQIQKVHPAIQQFTEQEICRSKSIKSLALLEELYNSQLIVATTCMGINHPIFSRKIFDFCIVDEASQISQPICLGPLFFSRRFVLVGDHQQLPPLVLNREARALGMSESLFKRLEQNKSAVVQLTVQYRMNSKIMSLSNKLTYEGKLECGSDKVANAVINLRHFKDVKLELEFYADYSDNPWLMGVFEPNNPVCFLNTDKVPAPEQVEKGGVSNVTEAKLIVFLTSIFVKAGCSPSDIGIIAPYRQQLKIINDLLARSIGMVEVNTVDKYQGRDKSIVLVSFVRSNKDGTVGELLKDWRRLNVAITRAKHKLILLGCVPSLNCYPPLEKLLNHLNSEKLISFFFCIWSHLIALL

SEQ ID NO: 142 - protein, 88 aa, Homo Sapiens
MALRSHDRSTRPLYISVGHRMSLEAAVRLTCCCCRFRIPEPVRQADICSREHIRKSLGLPGPPTPRSPKAQRPVACPKGDSGESSALC

SEQ ID NO: 143 - protein, 212 aa, Homo Sapiens
CYTNHALSYDQAKRVPRWVLEHISKSKIMGDADRKHCKFKPDPNIPPTFSAFNEDYVGSGWSRGHMAPAGNNKFSSKAMAETFYLSNIVPQDFDNNSGYWNRIEMYCRELTERFEDVWVVSGPLTLPQTRGDGKKIVSYQVIGEDNVAVPSHLYKVILARRSSVSTEPLALGAFVVPNEAIGFQPQLTEFQVSLQDLEKLSGLVFFPHLDRT

SEQ ID NO: 144 - protein, 123 aa, Homo Sapiens
VTVSQMTSVLNGKTRRFADIQLQHGALCFNIRYGTTVEEEKNHVLEIARQRAVAQAWTKEQRRLQEGEEGIRAWTEGEKQQLLSTGRVQGYDGYFVLSVEQYLELSDSANNIHFMRQSEIGRR

SEQ ID NO: 145 - protein, 125 aa, Homo Sapiens
TVSQPTLLVNGKTRRFTNIEFQYSTLLLSIRYGLTPDTLDEEKARVLDQARQRALGTAWAKEQQKARDGREGSRLWTEGEKQQLLSTGRVQGYEGYYVLPVEQYPELADSSSNIQFLRQNEMGKR

SEQ ID NO: 146 - skipped

SEQ ID NO: 147 - protein, 1368 aa, Streptococcus pyogenes [sequence omitted]

SEQ ID NO: 148 - protein, 1368 aa, Streptococcus pyogenes
MDKKYSIGLAIGTNSVGWAVITDEYKVPSKKFKVLGNTDRHSIKKNLIGALLFDSGETAEATRLKRTARRRYTRRKNRICYLQEIFSNEMAKVDDSFFHRLEESFLVEEDKKHERHPIFGNIVDEVAYHEKYPTIYHLRKKLVDSTDKADLRLIYLALAHMIKFRGHFLIEGDLNPDNSDVDKLFIQLVQTYNQLFEENPINASGVDAKAILSARLSKSRRLENLIAQLPGEKKNGLFGNLIALSLGLTPNFKSNFDLAEDAKLQLSKDTYDDDLDNLLAQIGDQYADLFLAAKNLSDAILLSDILRVNTEITKAPLSASMIKRYDEHHQDLTLLKALVRQQLPEKYKEIFFDQSKNGYAGYIDGGASQEEFYKFIKPILEKMDGTEELLVKLNREDLLRKQRTFDNGSIPHQIHLGELHAILRRQEDFYPFLKDNREKIEKILTFRIPYYVGPLARGNSRFAWMTRKSEETITPWNFEEVVDKGASAQSFIERMTNFDKNLPNEKVLPKHSLLYEYFTVYNELTKVKYVTEGMRKPAFLSGEQKKAIVDLLFKTNRKVTVKQLKEDYFKKIECFDSVEISGVEDRFNASLGTYHDLLKIIKDKDFLDNEENEDILEDIVLTLTLFEDREMIEERLKTYAHLFDDKVMKQLKRRRYTGWGRLSRKLINGIRDKQSGKTILDFLKSDGFANRNFMQLIHDDSLTFKEDIQKAQVSGQGDSLHEHIANLAGSPAIKKGILQTVKVVDELVKVMGRHKPENIVIEMARENQTTQKGQKNSRERMKRIEEGIKELGSQILKEHPVENTQLQNEKLYLYYLQNGRDMYVDQELDINRLSDYDVDAIVPQSFLKDDSIDNKVLTRSDKNRGKSDNVPSEEVVKKMKNYWRQLLNAKLITQRKFDNLTKAERGGLSELDKAGFIKRQLVETRQITKHVAQILDSRMNTKYDENDKLIREVKVITLKSKLVSDFRKDFQFYKVREINNYHHAHDAYLNAVVGTALIKKYPKLESEFVYGDYKVYDVRKMIAKSEQEIGKATAKYFFYSNIMNFFKTEITLANGEIRKRPLIETNGETGEIVWDKGRDFATVRKVLSMPQVNIVKKTEVQTGGFSKESILPKRNSDKLIARKKDWDPKKYGGFDSPTVAYSVLVVAKVEKGKSKKLKSVKELLGITIMERSSFEKNPIDFLEAKGYKEVKKDLIIKLPKYSLFELENGRKRMLASAGELQKGNELALPSKYVNFLYLASHYEKLKGSPEDNEQKQLFVEQHKHYLDEIIEQISEFSKRVILADANLDKVLSAYNKHRDKPIREQAENIIHLFTLTNLGAPAAFKYFDTTIDRKRYTSTKEVLDATLIHQSITGLYETRIDLSQLGGD

SEQ ID NO: 149 - protein, 1368 aa, Streptococcus pyogenes [sequence omitted]

SEQ ID NO: 150 - protein, 1053 aa, Staphylococcus aureus
MKRNYILGLDIGITSVGYGIIDYETRDVIDAGVRLFKEANVENNEGRRSKRGARRLKRRRRHRIQRVKKLLFDYNLLTDHSELSGINPYEARVKGLSQKLSEEEFSAALLHLAKRRGVHNVNEVEEDTGNELSTKEQISRNSKALEEKYVAELQLERLKKDGEVRGSINRFKTSDYVKEAKQLLKVQKAYHQLDQSFIDTYIDLLETRRTYYEGPGEGSPFGWKDIKEWYEMLMGHCTYFPEELRSVKYAYNADLYNALNDLNNLVITRDENEKLEYYEKFQIIENVFKQKKKPTLKQIAKEILVNEEDIKGYRVTSTGKPEFTNLKVYHDIKDITARKEIIENAELLDQIAKILTIYQSSEDIQEELTNLNSELTQEEIEQISNLKGYTGTHNLSLKAINLILDELWHTNDNQIAIFNRLKLVPKKVDLSQQKEIPTTLVDDFILSPVVKRSFIQSIKVINAIIKKYGLPNDIIIELAREKNSKDAQKMINEMQKRNRQTNERIEEIIRTTGKENAKYLIEKIKLHDMQEGKCLYSLEAIPLEDLLNNPFNYEVDHIIPRSVSFDNSFNNKVLVKQEENSKKGNRTPFQYLSSSDSKISYETFKKHILNLAKGKGRISKTKKEYLLEERDINRFSVQKDFINRNLVDTRYATRGLMNLLRSYFRVNNLDVKVKSINGGFTSFLRRKWKFKKERNKGYKHHAEDALIIANADFIFKEWKKLDKAKKVMENQMFEEKQAESMPEIETEQEYKEIFITPHQIKHIKDFKDYKYSHRVDKKPNRELINDTLYSTRKDDKGNTLIVNNLNGLYDKDNDKLKKLINKSPEKLLMYHHDPQTYQKLKLIMEQYGDEKNPLYKYYEETGNYLTKYSKKDNGPVIKKIKYYGNKLNAHLDITDDYPNSRNKVVKLSLKPYRFDVYLDNGVYKFVTVKNLDVIKKENYYEVNSKCYEEAKKLKKISNQAEFIASFYNNDLIKINGELYRVIGVNNDLLNRIEVNMIDITYREYLENMNDKRPPRIIKTIASKTQSIKKYSTDILGNLYEVKSKKHPQIIKKG

SEQ ID NO: 151 - protein, 1121 aa, Streptococcus thermophilus
MSDLVLGLDIGIGSVGVGILNKVTGEIIHKNSRIFPAAQAENNLVRRTNRQGRRLARRKKHRRVRLNRLFEESGLITDFTKISINLNPYQLRVKGLTDELSNEELFIALKNMVKHRGISYLDDASDDGNSSVGDYAQIVKENSKQLETKTPGQIQLERYQTYGQLRGDFTVEKDGKKHRLINVFPTSAYRSEALRILQTQQEFNPQITDEFINRYLEILTGKRKYYHGPGNEKSRTDYGRYRTSGETLDNIFGILIGKCTFYPDEFRAAKASYTAQEFNLLNDLNNLTVPTETKKLSKEQKNQIINYVKNEKAMGPAKLFKYIAKLLSCDVADIKGYRIDKSGKAEIHTFEAYRKMKTLETLDIEQMDRETLDKLAYVLTLNTEREGIQEALEHEFADGSFSQKQVDELVQFRKANSSIFGKGWHNFSVKLMMELIPELYETSEEQMTILTRLGKQKTTSSSNKTKYIDEKLLTEEIYNPVVAKSVRQAIKIVNAAIKEYGDFDNIVIEMARETNEDDEKKAIQKIQKANKDEKDAAMLKAANQYNGKAELPHSVFHGHKQLATKIRLWHQQGERCLYTGKTISIHDLINNSNQFEVDHILPLSITFDDSLANKVLVYATANQEKGQRTPYQALDSMDDAWSFRELKAFVRESKTLSNKKKEYLLTEEDISKFDVRKKFIERNLVDTRYASRVVLNALQEHFRAHKIDTKVSVVRGQFTSQLRRHWGIEKTRDTYHHHAVDALIIAASSQLNLWKKQKNTLVSYSEDQLLDIETGELISDDEYKESVFKAPYQHFVDTLKSKEFEDSILFSYQVDSKFNRKISDATIYATRQAKVGKDKADETYVLGKIKDIYTQDGYDAFMKIYKKDKSKFLMYRHDPQTFEKVIEPILENYPNKQINDKGKEVPCNPFLKYKEEHGYIRKYSKKGNGPEIKSLKYYDSKLGNHIDITPKDSNNKVVLQSVSPWRADVYFNKTTGKYEILGLKYADLQFDKGTGTYKISQEKYNDIKKKEGVDSDSEFKFTLYKNDLLLVKDTETKEQQLFRFLSRTMPKQKHYVELKPYDKQKFEGGEALIKVLGNVANSGQCKKGLGKSNISIYKVRTDVLGNQHIIKNEGDKPKLDF

SEQ ID NO: 152 - protein, 1082 aa, Neisseria meningitidis
MAAFKPNPINYILGLDIGIASVGWAMVEIDEDENPICLIDLGVRVFERAEVPKTGDSLAMARRLARSVRRLTRRRAHRLLRARRLLKREGVLQAADFDENGLIKSLPNTPWQLRAAALDRKLTPLEWSAVLLHLIKHRGYLSQRKNEGETADKELGALLKGVADNAHALQTGDFRTPAELALNKFEKESGHIRNQRGDYSHTFSRKDLQAELILLFEKQKEFGNPHVSGGLKEGIETLLMTQRPALSGDAVQKMLGHCTFEPAEPKAAKNTYTAERFIWLTKLNNLRILEQGSERPLTDTERATLMDEPYRKSKLTYAQARKLLGLEDTAFFKGLRYGKDNAEASTLMEMKAYHAISRALEKEGLKDKKSPLNLSPELQDEIGTAFSLFKTDEDITGRLKDRIQPEILEALLKHISFDKFVQISLKALRRIVPLMEQGKRYDEACAEIYGDHYGKKNTEEKIYLPPIPADEIRNPVVLRALSQARKVINGVVRRYGSPARIHIETAREVGKSFKDRKEIEKRQEENRKDREKAAAKFREYFPNFVGEPKSKDILKLRLYEQQHGKCLYSGKEINLGRLNEKGYVEIDHALPFSRTWDDSFNNKVLVLGSENQNKGNQTPYEYFNGKDNSREWQEFKARVETSRFPRSKKQRILLQKFDEDGFKERNLNDTRYVNRFLCQFVADRMRLTGKGKKRVFASNGQITNLLRGFWGLRKVRAENDRHHALDAVVVACSTVAMQQKITRFVRYKEMNAFDGKTIDKETGEVLHQKTHFPQPWEFFAQEVMIRVFGKPDGKPEFEEADTPEKLRTLLAEKLSSRPEAVHEYVTPLFVSRAPNRKMSGQGHMETVKSAKRLDEGVSVLRVPLTQLKLKDLEKMVNREREPKLYEALKARLEAHKDDPAKAFAEPFYKYDKAGNRTQQVKAVRVEQVQKTGVWVRNHNGIADNATMVRVDVFEKGDKYYLVPIYSWQVAKGILPDRAVVQGKDEEDWQLIDDSFNFKFSLHPNDLVEVITKKARMFGYFASCHRGTGNINIRIHDLDHKIGKNGILEGIGVKTALSFQKYQIDELGKEIRPCRLKKRPPVR

SEQ ID NO: 153 - protein, 1037 aa, Parvibaculum lavamentivorans
MERIFGFDIGTTSIGFSVIDYSSTQSAGNIQRLGVRIFPEARDPDGTPLNQQRRQKRMMRRQLRRRRIRRKALNETLHEAGFLPAYGSADWPVVMADEPYELRRRGLEEGLSAYEFGRAIYHLAQHRHFKGRELEESDTPDPDVDDEKEAANERAATLKALKNEQTTLGAWLARRPPSDRKRGIHAHRNVVAEEFERLWEVQSKFHPALKSEEMRARISDTIFAQRPVFWRKNTLGECRFMPGEPLCPKGSWLSQQRRMLEKLNNLAIAGGNARPLDAEERDAILSKLQQQASMSWPGVRSALKALYKQRGEPGAEKSLKFNLELGGESKLLGNALEAKLADMFGPDWPAHPRKQEIRHAVHERLWAADYGETPDKKRVIILSEKDRKAHREAAANSFVADFGITGEQAAQLQALKLPTGWEPYSIPALNLFLAELEKGERFGALVNGPDWEGWRRTNFPHRNQPTGEILDKLPSPASKEERERISQLRNPTVVRTQNELRKVVNNLIGLYGKPDRIRIEVGRDVGKSKREREEIQSGIRRNEKQRKKATEDLIKNGIANPSRDDVEKWILWKEGQERCPYTGDQIGFNALFREGRYEVEHIWPRSRSFDNSPRNKTLCRKDVNIEKGNRMPFEAFGHDEDRWSAIQIRLQGMVSAKGGTGMSPGKVKRFLAKTMPEDFAARQLNDTRYAAKQILAQLKRLWPDMGPEAPVKVEAVTGQVTAQLRKLWTLNNILADDGEKTRADHRHHAIDALTVACTHPGMTNKLSRYWQLRDDPRAEKPALTPPWDTIRADAEKAVSEIVVSHRVRKKVSGPLHKETTYGDTGTDIKTKSGTYRQFVTRKKIESLSKGELDEIRDPRIKEIVAAHVAGRGGDPKKAFPPYPCVSPGGPEIRKVRLTSKQQLNLMAQTGNGYADLGSNHHIAIYRLPDGKADFEIVSLFDASRRLAQRNPIVQRTRADGASFVMSLAAGEAIMIPEGSKKGIWIVQGVWASGQVVLERDTDADHSTTTRPMPNPILKDDAKKVSIDPIGRVRPSND

SEQ ID NO: 154 - protein, 1084 aa, Corynebacter diphtheria
MKYHVGIDVGTFSVGLAAIEVDDAGMPIKTLSLVSHIHDSGLDPDEIKSAVTRLASSGIARRTRRLYRRKRRRLQQLDKFIQRQGWPVIELEDYSDPLYPWKVRAELAASYIADEKERGEKLSVALRHIARHRGWRNPYAKVSSLYLPDGPSDAFKAIREEIKRASGQPVPETATVGQMVTLCELGTLKLRGEGGVLSARLQQSDYAREIQEICRMQEIGQELYRKIIDVVFAAESPKGSASSRVGKDPLQPGKNRALKASDAFQRYRIAALIGNLRVRVDGEKRILSVEEKNLVFDHLVNLTPKKEPEWVTIAEILGIDRGQLIGTATMTDDGERAGARPPTHDTNRSIVNSRIAPLVDWWKTASALEQHAMVKALSNAEVDDFDSPEGAKVQAFFADLDDDVHAKLDSLHLPVGRAAYSEDTLVRLTRRMLSDGVDLYTARLQEFGIEPSWTPPTPRIGEPVGNPAVDRVLKTVSRWLESATKTWGAPERVIIEHVREGFVTEKRAREMDGDMRRRAARNAKLFQEMQEKLNVQGKPSRADLWRYQSVQRQNCQCAYCGSPITFSNSEMDHIVPRAGQGSTNTRENLVAVCHRCNQSKGNTPFAIWAKNTSIEGVSVKEAVERTRHWVTDTGMRSTDFKKFTKAVVERFQRATMDEEIDARSMESVAWMANELRSRVAQHFASHGTTVRVYRGSLTAEARRASGISGKLKFFDGVGKSRLDRRHHAIDAAVIAFTSDYVAETLAVRSNLKQSQAHRQEAPQWREFTGKDAEHRAAWRVWCQKMEKLSALLTEDLRDDRVVVMSNVRLRLGNGSAHKETIGKLSKVKLSSQLSVSDIDKASSEALWCALTREPGFDPKEGLPANPERHIRVNGTHVYAGDNIGLFPVSAGSIALRGGYAELGSSFHHARVYKITSGKKPAFAMLRVYTIDLLPYRNQDLFSVELKPQTMSMRQAEKKLRDALATGNAEYLGWLVVDDELVVDTSKIATDQVKAVEAELGTIRRWRVDGFFSPSKLRLRPLQMSKEGIKKESAPELSKIIDRPGWLPAVNKLFSDGNVTVVRRDSLGRVRLESTAHLPVTWKVQ

SEQ ID NO: 155 - protein, 1130 aa, Streptococcus pasteurianus
MTNGKILGLDIGIASVGVGIIEAKTGKVVHANSRLFSAANAENNAERRGFRGSRRLNRRKKHRVKRVRDLFEKYGIVTDFRNLNLNPYELRVKGLTEQLKNEELFAALRTISKRRGISYLDDAEDDSTGSTDYAKSIDENRRLLKNKTPGQIQLERLEKYGQLRGNFTVYDENGEAHRLINVFSTSDYEKEARKILETQADYNKKITAEFIDDYVEILTQKRKYYHGPGNEKSRTDYGRFRTDGTTLENIFGILIGKCNFYPDEYRASKASYTAQEYNFLNDLNNLKVSTETGKLSTEQKESLVEFAKNTATLGPAKLLKEIAKILDCKVDEIKGYREDDKGKPDLHTFEPYRKLKFNLESINIDDLSREVIDKLADILTLNTEREGIEDAIKRNLPNQFTEEQISEIIKVRKSQSTAFNKGWHSFSAKLMNELIPELYATSDEQMTILTRLEKFKVNKKSSKNTKTIDEKEVTDEIYNPVVAKSVRQTIKIINAAVKKYGDFDKIVIEMPRDKNADDEKKFIDKRNKENKKEKDDALKRAAYLYNSSDKLPDEVFHGNKQLETKIRLWYQQGERCLYSGKPISIQELVHNSNNFEIDHILPLSLSFDDSLANKVLVYAWTNQEKGQKTPYQVIDSMDAAWSFREMKDYVLKQKGLGKKKRDYLLTTENIDKIEVKKKFIERNLVDTRYASRVVLNSLQSALRELGKDTKVSVVRGQFTSQLRRKWKIDKSRETYHHHAVDALIIAASSQLKLWEKQDNPMFVDYGKNQVVDKQTGEILSVSDDEYKELVFQPPYQGFVNTISSKGFEDEILFSYQVDSKYNRKVSDATIYSTRKAKIGKDKKEETYVLGKIKDIYSQNGFDTFIKKYNKDKTQFLMYQKDSLTWENVIEVILRDYPTTKKSEDGKNDVKCNPFEEYRRENGLICKYSKKGKGTPIKSLKYYDKKLGNCIDITPEESRNKVILQSINPWRADVYFNPETLKYELMGLKYSDLSFEKGTGNYHISQEKYDAIKEKEGIGKKSEFKFTLYRNDLILIKDIASGEQEIYRFLSRTMPNVNHYVELKPYDKEKFDNVQELVEALGEADKVGRCIKGLNKPNISIYKVRTDVLGNKYFVKKKGDKPKLDFKNNKK

SEQ ID NO: 156 - protein, 1082 aa, Neisseria cinerea
MAAFKPNPMNYILGLDIGIASVGWAIVEIDEEENPIRLIDLGVRVFERAEVPKTGDSLAAARRLARSVRRLTRRRAHRLLRARRLLKREGVLQAADFDENGLIKSLPNTPWQLRAAALDRKLTPLEWSAVLLHLIKHRGYLSQRKNEGETADKELGALLKGVADNTHALQTGDFRTPAELALNKFEKESGHIRNQRGDYSHTFNRKDLQAELNLLFEKQKEFGNPHVSDGLKEGIETLLMTQRPALSGDAVQKMLGHCTFEPTEPKAAKNTYTAERFVWLTKLNNLRILEQGSERPLTDTERATLMDEPYRKSKLTYAQARKLLDLDDTAFFKGLRYGKDNAEASTLMEMKAYHAISRALEKEGLKDKKSPLNLSPELQDEIGTAFSLFKTDEDITGRLKDRVQPEILEALLKHISFDKFVQISLKALRRIVPLMEQGNRYDEACTEIYGDHYGKKNTEEKIYLPPIPADEIRNPVVLRALSQARKVINGVVRRYGSPARIHIETAREVGKSFKDRKEIEKRQEENRKDREKSAAKFREYFPNFVGEPKSKDILKLRLYEQQHGKCLYSGKEINLGRLNEKGYVEIDHALPFSRTWDDSFNNKVLALGSENQNKGNQTPYEYFNGKDNSREWQEFKARVETSRFPRSKKQRILLQKFDEDGFKERNLNDTRYINRFLCQFVADHMLLTGKGKRRVFASNGQITNLLRGFWGLRKVRAENDRHHALDAVVVACSTIAMQQKITRFVRYKEMNAFDGKTIDKETGEVLHQKAHFPQPWEFFAQEVMIRVFGKPDGKPEFEEADTPEKLRTLLAEKLSSRPEAVHKYVTPLFISRAPNRKMSGQGHMETVKSAKRLDEGISVLRVPLTQLKLKDLEKMVNREREPKLYEALKARLEAHKDDPAKAFAEPFYKYDKAGNRTQQVKAVRVEQVQKTGVWVHNHNGIADNATIVRVDVFEKGGKYYLVPIYSWQVAKGILPDRAVVQGKDEEDWTVMDDSFEFKFVLYANDLIKLTAKKNEFLGYFVSLNRATGAIDIRTHDTDSTKGKNGIFQSVGVKTALSFQKYQIDELGKEIRPCRLKKRPPVR

SEQ ID NO: 157 - protein, 1003 aa, Campylobacter lari
MRILGFDIGINSIGWAFVENDELKDCGVRIFTKAENPKNKESLALPRRNARSSRRRLKRRKARLIAIKRILAKELKLNYKDYVAADGELPKAYEGSLASVYELRYKALTQNLETKDLARVILHIAKHRGYMNKNEKKSNDAKKGKILSALKNNALKLENYQSVGEYFYKEFFQKYKKNTKNFIKIRNTKDNYNNCVLSSDLEKELKLILEKQKEFGYNYSEDFINEILKVAFFQRPLKDFSHLVGACTFFEEEKRACKNSYSAWEFVALTKIINEIKSLEKISGEIVPTQTINEVLNLILDKGSITYKKFRSCINLHESISFKSLKYDKENAENAKLIDFRKLVEFKKALGVHSLSRQELDQISTHITLIKDNVKLKTVLEKYNLSNEQINNLLEIEFNDYINLSFKALGMILPLMREGKRYDEACEIANLKPKTVDEKKDFLPAFCDSIFAHELSNPVVNRAISEYRKVLNALLKKYGKVHKIHLELARDVGLSKKAREKIEKEQKENQAVNAWALKECENIGLKASAKNILKLKLWKEQKEICIYSGNKISIEHLKDEKALEVDHIYPYSRSFDDSFINKVLVFTKENQEKLNKTPFEAFGKNIEKWSKIQTLAQNLPYKKKNKILDENFKDKQQEDFISRNLNDTRYIATLIAKYTKEYLNFLLLSENENANLKSGEKGSKIHVQTISGMLTSVLRHTWGFDKKDRNNHLHHALDAIIVAYSTNSIIKAFSDFRKNQELLKARFYAKELTSDNYKHQVKFFEPFKSFREKILSKIDEIFVSKPPRKRARRALHKDTFHSENKIIDKCSYNSKEGLQIALSCGRVRKIGTKYVENDTIVRVDIFKKQNKFYAIPIYAMDFALGILPNKIVITGKDKNNNPKQWQTIDESYEFCFSLYKNDLILLQKKNMQEPEFAYYNDFSISTSSICVEKHDNKFENLTSNQKLLFSNAKEGSVKVESLGIQNLKVFEKYIITPLGDKIKADFQPRENISLKTSKKYGLR

SEQ ID NO: 158 - protein, 1395 aa, Treponema denticola
MKKEIKDYFLGLDVGTGSVGWAVTDTDYKLLKANRKDLWGMRCFETAETAEVRRLHRGARRRIERRKKRIKLLQELFSQEIAKTDEGFFQRMKESPFYAEDKTILQENTLFNDKDFADKTYHKAYPTINHLIKAWIENKVKPDPRLLYLACHNIIKKRGHFLFEGDFDSENQFDTSIQALFEYLREDMEVDIDADSQKVKEILKDSSLKNSEKQSRLNKILGLKPSDKQKKAITNLISGNKINFADLYDNPDLKDAEKNSISFSKDDFDALSDDLASILGDSFELLLKAKAVYNCSVLSKVIGDEQYLSFAKVKIYEKHKTDLTKLKNVIKKHFPKDYKKVFGYNKNEKNNNNYSGYVGVCKTKSKKLIINNSVNQEDFYKFLKTILSAKSEIKEVNDILTEIETGTFLPKQISKSNAEIPYQLRKMELEKILSNAEKHFSFLKQKDEKGLSHSEKIIMLLTFKIPYYIGPINDNHKKFFPDRCWVVKKEKSPSGKTTPWNFFDHIDKEKTAEAFITSRTNFCTYLVGESVLPKSSLLYSEYTVLNEINNLQIIIDGKNICDIKLKQKIYEDLFKKYKKITQKQISTFIKHEGICNKTDEVIILGIDKECTSSLKSYIELKNIFGKQVDEISTKNMLEEIIRWATIYDEGEGKTILKTKIKAEYGKYCSDEQIKKILNLKFSGWGRLSRKFLETVTSEMPGFSEPVNIITAMRETQNNLMELLSSEFTFTENIKKINSGFEDAEKQFSYDGLVKPLFLSPSVKKMLWQTLKLVKEISHITQAPPKKIFIEMAKGAELEPARTKTRLKILQDLYNNCKNDADAFSSEIKDLSGKIENEDNLRLRSDKLYLYYTQLGKCMYCGKPIEIGHVFDTSNYDIDHIYPQSKIKDDSISNRVLVCSSCNKNKEDKYPLKSEIQSKQRGFWNFLQRNNFISLEKLNRLTRATPISDDETAKFIARQLVETRQATKVAAKVLEKMFPETKIVYSKAETVSMFRNKFDIVKCREINDFHHAHDAYLNIVVGNVYNTKFTNNPWNFIKEKRDNPKIADTYNYYKVFDYDVKRNNITAWEKGKTIITVKDMLKRNTPIYTRQAACKKGELFNQTIMKKGLGQHPLKKEGPFSNISKYGGYNKVSAAYYTLIEYEEKGNKIRSLETIPLYLVKDIQKDQDVLKSYLTDLLGKKEFKILVPKIKINSLLKINGFPCHITGKTNDSFLLRPAVQFCCSNNEVLYFKKIIRFSEIRSQREKIGKTISPYEDLSFRSYIKENLWKKTKNDEIGEKEFYDLLQKKNLEIYDMLLTKHKDTIYKKRPNSATIDILVKGKEKFKSLIIENQFEVILEILKLFSATRNVSDLQHIGGSKYSGVAKIGNKISSLDNCILIYQSITGIFEKRIDLLKV

SEQ ID NO: 159 - protein, 1345 aa, Streptococcus mutans
MKKPYSIGLDIGTNSVGWAVVTDDYKVPAKKMKVLGNTDKSHIEKNLLGALLFDSGNTAEDRRLKRTARRRYTRRRNRILYLQEIFSEEMGKVDDSFFHRLEDSFLVTEDKRGERHPIFGNLEEEVKYHENFPTIYHLRQYLADNPEKVDLRLVYLALAHIIKFRGHFLIEGKFDTRNNDVQRLFQEFLAVYDNTFENSSLQEQNVQVEEILTDKISKSAKKDRVLKLFPNEKSNGRFAEFLKLIVGNQADFKKHFELEEKAPLQFSKDTYEEELEVLLAQIGDNYAELFLSAKKLYDSILLSGILTVTDVGTKAPLSASMIQRYNEHQMDLAQLKQFIRQKLSDKYNEVFSDVSKDGYAGYIDGKTNQEAFYKYLKGLLNKIEGSGYFLDKIEREDFLRKQRTFDNGSIPHQIHLQEMRAIIRRQAEFYPFLADNQDRIEKLLTFRIPYYVGPLARGKSDFAWLSRKSADKITPWNFDEIVDKESSAEAFINRMTNYDLYLPNQKVLPKHSLLYEKFTVYNELTKVKYKTEQGKTAFFDANMKQEIFDGVFKVYRKVTKDKLMDFLEKEFDEFRIVDLTGLDKENKVFNASYGTYHDLCKILDKDFLDNSKNEKILEDIVLTLTLFEDREMIRKRLENYSDLLTKEQVKKLERRHYTGWGRLSAELIHGIRNKESRKTILDYLIDDGNSNRNFMQLINDDALSFKEEIAKAQVIGETDNLNQVVSDIAGSPAIKKGILQSLKIVDELVKIMGHQPENIVVEMARENQFTNQGRRNSQQRLKGLTDSIKEFGSQILKEHPVENSQLQNDRLFLYYLQNGRDMYTGEELDIDYLSQYDIDHIIPQAFIKDNSIDNRVLTSSKENRGKSDDVPSKDVVRKMKSYWSKLLSAKLITQRKFDNLTKAERGGLTDDDKAGFIKRQLVETRQITKHVARILDERFNTETDENNKKIRQVKIVTLKSNLVSNFRKEFELYKVREINDYHHAHDAYLNAVIGKALLGVYPQLEPEFVYGDYPHFHGHKENKATAKKFFYSNIMNFFKKDDVRTDKNGEIIWKKDEHISNIKKVLSYPQVNIVKKVEEQTGGFSKESILPKGNSDKLIPRKTKKFYWDTKKYGGFDSPIVAYSILVIADIEKGKSKKLKTVKALVGVTIMEKMTFERDPVAFLERKGYRNVQEENIIKLPKYSLFKLENGRKRLLASARELQKGNEIVLPNHLGTLLYHAKNIHKVDEPKHLDYVDKHKDEFKELLDVVSNFSKKYTLAEGNLEKIKELYAQNNGEDLKELASSFINLLTFTAIGAPATFKFFDKNIDRKRYTSTTEILNATLIHQSITGLYETRIDLNKLGGD

SEQ ID NO: 160 - protein, 1388 aa, Streptococcus thermophilus
MTKPYSIGLDIGTNSVGWAVTTDNYKVPSKKMKVLGNTSKKYIKKNLLGVLLFDSGITAEGRRLKRTARRRYTRRRNRILYLQEIFSTEMATLDDAFFQRLDDSFLVPDDKRDSKYPIFGNLVEEKAYHDEFPTIYHLRKYLADSTKKADLRLVYLALAHMIKYRGHFLIEGEFNSKNNDIQKNFQDFLDTYNAIFESDLSLENSKQLEEIVKDKISKLEKKDRILKLFPGEKNSGIFSEFLKLIVGNQADFRKCFNLDEKASLHFSKESYDEDLETLLGYIGDDYSDVFLKAKKLYDAILLSGFLTVTDNETEAPLSSAMIKRYNEHKEDLALLKEYIRNISLKTYNEVFKDDTKNGYAGYIDGKTNQEDFYVYLKKLLAEFEGADYFLEKIDREDFLRKQRTFDNGSIPYQIHLQEMRAILDKQAKFYPFLAKNKERIEKILTFRIPYYVGPLARGNSDFAWSIRKRNEKITPWNFEDVIDKESSAEAFINRMTSFDLYLPEEKVLPKHSLLYETFNVYNELTKVRFIAESMRDYQFLDSKQKKDIVRLYFKDKRKVTDKDIIEYLHAIYGYDGIELKGIEKQFNSSLSTYHDLLNIINDKEFLDDSSNEAIIEEIIHTLTIFEDREMIKQRLSKFENIFDKSVLKKLSRRHYTGWGKLSAKLINGIRDEKSGNTILDYLIDDGISNRNFMQLIHDDALSFKKKIQKAQIIGDEDKGNIKEVVKSLPGSPAIKKGILQSIKIVDELVKVMGGRKPESIVVEMARENQYTNQGKSNSQQRLKRLEKSLKELGSKILKENIPAKLSKIDNNALQNDRLYLYYLQNGKDMYTGDDLDIDRLSNYDIDHIIPQAFLKDNSIDNKVLVSSASNRGKSDDVPSLEVVKKRKTFWYQLLKSKLISQRKFDNLTKAERGGLSPEDKAGFIQRQLVETRQITKHVARLLDEKFNNKKDENNRAVRTVKIITLKSTLVSQFRKDFELYKVREINDFHHAHDAYLNAVVASALLKKYPKLEPEFVYGDYPKYNSFRERKSATEKVYFYSNIMNIFKKSISLADGRVIERPLIEVNEETGESVWNKESDLATVRRVLSYPQVNVVKKVEEQNHGLDRGKPKGLFNANLSSKPKPNSNENLVGAKEYLDPKKYGGYAGISNSFTVLVKGTIEKGAKKKITNVLEFQGISILDRINYRKDKLNFLLEKGYKDIELIIELPKYSLFELSDGSRRMLASILSTNNKRGEIHKGNQIFLSQKFVKLLYHAKRISNTINENHRKYVENHKKEFEELFYYILEFNENYVGAKKNGKLLNSAFQSWQNHSIDELCSSFIGPTGSERKGLFELTSRGSAADFEFLGVKIPRYRDYTPSSLLKDATLIHQSVTGLYETRIDLAKLGEG

SEQ ID NO: 161 - protein, 984 aa, Campylobacter jejuni
MARILAFDIGISSIGWAFSENDELKDCGVRIFTKVENPKTGESLALPRRLARSARKRLARRKARLNHLKHLIANEFKLNYEDYQSFDESLAKAYKGSLISPYELRFRALNELLSKQDFARVILHIAKRRGYDDIKNSDDKEKGAILKAIKQNEEKLANYQSVGEYLYKEYFQKFKENSKEFTNVRNKKESYERCIAQSFLKDELKLIFKKQREFGFSFSKKFEEEVLSVAFYKRALKDFSHLVGNCSFFTDEKRAPKNSPLAFMFVALTRIINLLNNLKNTEGILYTKDDLNALLNEVLKNGTLTYKQTKKLLGLSDDYEFKGEKGTYFIEFKKYKEFIKALGEHNLSQDDLNEIAKDITLIKDEIKLKKALAKYDLNQNQIDSLSKLEFKDHLNISFKALKLVTPLMLEGKKYDEACNELNLKVAINEDKKDFLPAFNETYYKDEVTNPVVLRAIKEYRKVLNALLKKYGKVHKINIELAREVGKNHSQRAKIEKEQNENYKAKKDAELECEKLGLKINSKNILKLRLFKEQKEFCAYSGEKIKISDLQDEKMLEIDHIYPYSRSFDDSYMNKVLVFTKQNQEKLNQTPFEAFGNDSAKWQKIEVLAKNLPTKKQKRILDKNYKDKEQKNFKDRNLNDTRYIARLVLNYTKDYLDFLPLSDDENTKLNDTQKGSKVHVEAKSGMLTSALRHTWGFSAKDRNNHLHHAIDAVIIAYANNSIVKAFSDFKKEQESNSAELYAKKISELDYKNKRKFFEPFSGFRQKVLDKIDEIFVSKPERKKPSGALHEETFRKEEEFYQSYGGKEGVLKALELGKIRKVNGKIVKNGDMFRVDIFKHKKTNKFYAVPIYTMDFALKVLPNKAVARSKKGEIKDWILMDENYEFCFSLYKDSLILIQTKDMQEPEFVYYNAFTSSTVSLIVSKHDNKFETLSKNQKILFKNANEKEVIAKSIGIQNLKVFEKYIVSALGEVTKAEFRQREDFKK

SEQ ID NO: 162 - protein, 1056 aa, Pasteurella multocida
MQTTNLSYILGLDLGIASVGWAVVEINENEDPIGLIDVGVRIFERAEVPKTGESLALSRRLARSTRRLIRRRAHRLLLAKRFLKREGILSTIDLEKGLPNQAWELRVAGLERRLSAIEWGAVLLHLIKHRGYLSKRKNESQTNNKELGALLSGVAQNHQLLQSDDYRTPAELALKKFAKEEGHIRNQRGAYTHTFNRLDLLAELNLLFAQQHQFGNPHCKEHIQQYMTELLMWQKPALSGEAILKMLGKCTHEKNEFKAAKHTYSAERFVWLTKLNNLRILEDGAERALNEEERQLLINHPYEKSKLTYAQVRKLLGLSEQAIFKHLRYSKENAESATFMELKAWHAIRKALENQGLKDTWQDLAKKPDLLDEIGTAFSLYKTDEDIQQYLTNKVPNSVINALLVSLNFDKFIELSLKSLRKILPLMEQGKRYDQACREIYGHHYGEANQKTSQLLPAIPAQEIRNPVVLRTLSQARKVINAIIRQYGSPARVHIETGRELGKSFKERREIQKQQEDNRTKRESAVQKFKELFSDFSSEPKSKDILKFRLYEQQHGKCLYSGKEINIHRLNEKGYVEIDHALPFSRTWDDSFNNKVLVLASENQNKGNQTPYEWLQGKINSERWKNFVALVLGSQCSAAKKQRLLTQVIDDNKFIDRNLNDTRYIARFLSNYIQENLLLVGKNKKNVFTPNGQITALLRSRWGLIKARENNNRHHALDAIVVACATPSMQQKITRFIRFKEVHPYKIENRYEMVDQESGEIISPHFPEPWAYFRQEVNIRVFDNHPDTVLKEMLPDRPQANHQFVQPLFVSRAPTRKMSGQGHMETIKSAKRLAEGISVLRIPLTQLKPNLLENMVNKEREPALYAGLKARLAEFNQDPAKAFATPFYKQGGQQVKAIRVEQVQKSGVLVRENNGVADNASIVRTDVFIKNNKFFLVPIYTWQVAKGILPNKAIVAHKNEDEWEEMDEGAKFKFSLFPNDLVELKTKKEYFFGYYIGLDRATGNISLKEHDGEISKGKDGVYRVGVKLALSFEKYQVDELGKNRQICRPQQRQPVR

SEQ ID NO: 163 - protein, 1629 aa, Francisella novicida
MNFKILPIAIDLGVKNTGVFSAFYQKGTSLERLDNKNGKVYELSKDSYTLLMNNRTARRHQRRGIDRKQLVKRLFKLIWTEQLNLEWDKDTQQAISFLFNRRGFSFITDGYSPEYLNIVPEQVKAILMDIFDDYNGEDDLDSYLKLATEQESKISEIYNKLMQKILEFKLMKLCTDIKDDKVSTKTLKEITSYEFELLADYLANYSESLKTQKFSYTDKQGNLKELSYYHHDKYNIQEFLKRHATINDRILDTLLTDDLDIWNFNFEKFDFDKNEEKLQNQEDKDHIQAHLHHFVFAVNKIKSEMASGGRHRSQYFQEITNVLDENNHQEGYLKNFCENLHNKKYSNLSVKNLVNLIGNLSNLELKPLRKYFNDKIHAKADHWDEQKFTETYCHWILGEWRVGVKDQDKKDGAKYSYKDLCNELKQKVTKAGLVDFLLELDPCRTIPPYLDNNNRKPPKCQSLILNPKFLDNQYPNWQQYLQELKKLQSIQNYLDSFETDLKVLKSSKDQPYFVEYKSSNQQIASGQRDYKDLDARILQFIFDRVKASDELLLNEIYFQAKKLKQKASSELEKLESSKKLDEVIANSQLSQILKSQHTNGIFEQGTFLHLVCKYYKQRQRARDSRLYIMPEYRYDKKLHKYNNTGRFDDDNQLLTYCNHKPRQKRYQLLNDLAGVLQVSPNFLKDKIGSDDDLFISKWLVEHIRGFKKACEDSLKIQKDNRGLLNHKINIARNTKGKCEKEIFNLICKIEGSEDKKGNYKHGLAYELGVLLFGEPNEASKPEFDRKIKKFNSIYSFAQIQQIAFAERKGNANTCAVCSADNAHRMQQIKITEPVEDNKDKIILSAKAQRLPAIPTRIVDGAVKKMATILAKNIVDDNWQNIKQVLSAKHQLHIPIITESNAFEFEPALADVKGKSLKDRRKKALERISPENIFKDKNNRIKEFAKGISAYSGANLTDGDFDGAKEELDHIIPRSHKKYGTLNDEANLICVTRGDNKNKGNRIFCLRDLADNYKLKQFETTDDLEIEKKIADTIWDANKKDFKFGNYRSFINLTPQEQKAFRHALFLADENPIKQAVIRAINNRNRTFVNGTQRYFAEVLANNIYLRAKKENLNTDKISFDYFGIPTIGNGRGIAEIRQLYEKVDSDIQAYAKGDKPQASYSHLIDAMLAFCIAADEHRNDGSIGLEIDKNYSLYPLDKNTGEVFTKDIFSQIKITDNEFSDKKLVRKKAIEGFNTHRQMTRDGIYAENYLPILIHKELNEVRKGYTWKNSEEIKIFKGKKYDIQQLNNLVYCLKFVDKPISIDIQISTLEELRNILTTNNIAATAEYYYINLKTQKLHEYYIENYNTALGYKKYSKEMEFLRSLAYRSERVKIKSIDDVKQVLDKDSNFIIGKITLPFKKEWQRLYREWQNTTIKDDYEFLKSFFNVKSITKLHKKVRKDFSLPISTNEGKFLVKRKTWDNNFIYQILNDSDSRADGTKPFIPAFDISKNEIVEAIIDSFTSKNIFWLPKNIELQKVDNKNIFAIDTSKWFEVETPSDLRDIGIATIQYKIDNNSRPKVRVKLDYVIDDDSKINYFMNHSLLKSRYPDKVLEILKQSTIIEFESSGFNKTIKEMLGMKLAGIYNETSNN

SEQ ID NO: 164 - protein, 1371 aa, Lactobacillus buchneri
MKVNNYHIGLDIGTSSIGWVAIGKDGKPLRVKGKTAIGARLFQEGNPAADRRMFRTTRRRLSRRKWRLKLLEEIFDPYITPVDSTFFARLKQSNLSPKDSRKEFKGSMLFPDLTDMQYHKNYPTIYHLRHALMTQDKKFDIRMVYLAIHHIVKYRGNFLNSTPVDSFKASKVDFVDQFKKLNELYAAINPEESFKINLANSEDIGHQFLDPSIRKFDKKKQIPKIVPVMMNDKVTDRLNGKIASEIIHAILGYKAKLDVVLQCTPVDSKPWALKFDDEDIDAKLEKILPEMDENQQSIVAILQNLYSQVTLNQIVPNGMSLSESMIEKYNDHHDHLKLYKKLIDQLADPKKKAVLKKAYSQYVGDDGKVIEQAEFWSSVKKNLDDSELSKQIMDLIDAEKFMPKQRTSQNGVIPHQLHQRELDEIIEHQSKYYPWLVEINPNKHDLHLAKYKIEQLVAFRVPYYVGPMITPKDQAESAETVFSWMERKGTETGQITPWNFDEKVDRKASANRFIKRMTTKDTYLIGEDVLPDESLLYEKFKVLNELNMVRVNGKLLKVADKQAIFQDLFENYKHVSVKKLQNYIKAKTGLPSDPEISGLSDPEHFNNSLGTYNDFKKLFGSKVDEPDLQDDFEKIVEWSTVFEDKKILREKLNEITWLSDQQKDVLESSRYQGWGRLSKKLLTGIVNDQGERIIDKLWNTNKNFMQIQSDDDFAKRIHEANADQMQAVDVEDVLADAYTSPQNKKAIRQVVKVVDDIQKAMGGVAPKYISIEFTRSEDRNPRRTISRQRQLENTLKDTAKSLAKSINPELLSELDNAAKSKKGLTDRLYLYFTQLGKDIYTGEPINIDELNKYDIDHILPQAFIKDNSLDNRVLVLTAVNNGKSDNVPLRMFGAKMGHFWKQLAEAGLISKRKLKNLQTDPDTISKYAMHGFIRRQLVETSQVIKLVANILGDKYRNDDTKIIEITARMNHQMRDEFGFIKNREINDYHHAFDAYLTAFLGRYLYHRYIKLRPYFVYGDFKKFREDKVTMRNFNFLHDLTDDTQEKIADAETGEVIWDRENSIQQLKDVYHYKFMLISHEVYTLRGAMFNQTVYPASDAGKRKLIPVKADRPVNVYGGYSGSADAYMAIVRIHNKKGDKYRVVGVPMRALDRLDAAKNVSDADFDRALKDVLAPQLTKTKKSRKTGEITQVIEDFEIVLGKVMYRQLMIDGDKKFMLGSSTYQYNAKQLVLSDQSVKTLASKGRLDPLQESMDYNNVYTEILDKVNQYFSLYDMNKFRHKLNLGFSKFISFPNHNVLDGNTKVSSGKREILQEILNGLHANPTFGNLKDVGITTPFGQLQQPNGILLSDETKIRYQSPTGLFERTVSLKDL

SEQ ID NO: 165 - protein, 1334 aa, Listeria innocua
MKKPYTIGLDIGTNSVGWAVLTDQYDLVKRKMKIAGDSEKKQIKKNFWGVRLFDEGQTAADRRMARTARRRIERRRNRISYLQGIFAEEMSKTDANFFCRLSDSFYVDNEKRNSRHPFFATIEEEVEYHKNYPTIYHLREELVNSSEKADLRLVYLALAHIIKYRGNFLIEGALDTQNTSVDGIYKQFIQTYNQVFASGIEDGSLKKLEDNKDVAKILVEKVTRKEKLERILKLYPGEKSAGMFAQFISLIVGSKGNFQKPFDLIEKSDIECAKDSYEEDLESLLALIGDEYAELFVAAKNAYSAVVLSSIITVAETETNAKLSASMIERFDTHEEDLGELKAFIKLHLPKHYEEIFSNTEKHGYAGYIDGKTKQADFYKYMKMTLENIEGADYFIAKIEKENFLRKQRTFDNGAIPHQLHLEELEAILHQQAKYYPFLKENYDKIKSLVTFRIPYFVGPLANGQSEFAWLTRKADGEIRPWNIEEKVDFGKSAVDFIEKMTNKDTYLPKENVLPKHSLCYQKYLVYNELTKVRYINDQGKTSYFSGQEKEQIFNDLFKQKRKVKKKDLELFLRNMSHVESPTIEGLEDSFNSSYSTYHDLLKVGIKQEILDNPVNTEMLENIVKILTVFEDKRMIKEQLQQFSDVLDGVVLKKLERRHYTGWGRLSAKLLMGIRDKQSHLTILDYLMNDDGLNRNLMQLINDSNLSFKSIIEKEQVTTADKDIQSIVADLAGSPAIKKGILQSLKIVDELVSVMGYPPQTIVVEMARENQTTGKGKNNSRPRYKSLEKAIKEFGSQILKEHPTDNQELRNNRLYLYYLQNGKDMYTGQDLDIHNLSNYDIDHIVPQSFITDNSIDNLVLTSSAGNREKGDDVPPLEIVRKRKVFWEKLYQGNLMSKRKFDYLTKAERGGLTEADKARFIHRQLVETRQITKNVANILHQRFNYEKDDHGNTMKQVRIVTLKSALVSQFRKQFQLYKVRDVNDYHHAHDAYLNGVVANTLLKVYPQLEPEFVYGDYHQFDWFKANKATAKKQFYTNIMLFFAQKDRIIDENGEILWDKKYLDTVKKVMSYRQMNIVKKTEIQKGEFSKATIKPKGNSSKLIPRKTNWDPMKYGGLDSPNMAYAVVIEYAKGKNKLVFEKKIIRVTIMERKAFEKDEKAFLEEQGYRQPKVLAKLPKYTLYECEEGRRRMLASANEAQKGNQQVLPNHLVTLLHHAANCEVSDGKSLDYIESNREMFAELLAHVSEFAKRYTLAEANLNKINQLFEQNKEGDIKAIAQSFVDLMAFNAMGAPASFKFFETTIERKRYNNLKELLNSTIIYQSITGLYESRKRLDD

SEQ ID NO: 166 - protein, 1372 aa, Legionella pneumophila
MESSQILSPIGIDLGGKFTGVCLSHLEAFAELPNHANTKYSVILIDHNNFQLSQAQRRATRHRVRNKKRNQFVKRVALQLFQHILSRDLNAKEETALCHYLNNRGYTYVDTDLDEYIKDETTINLLKELLPSESEHNFIDWFLQKMQSSEFRKILVSKVEEKKDDKELKNAVKNIKNFITGFEKNSVEGHRHRKVYFENIKSDITKDNQLDSIKKKIPSVCLSNLLGHLSNLQWKNLHRYLAKNPKQFDEQTFGNEFLRMLKNFRHLKGSQESLAVRNLIQQLEQSQDYISILEKTPPEITIPPYEARTNTGMEKDQSLLLNPEKLNNLYPNWRNLIPGIIDAHPFLEKDLEHTKLRDRKRIISPSKQDEKRDSYILQRYLDLNKKIDKFKIKKQLSFLGQGKQLPANLIETQKEMETHFNSSLVSVLIQIASAYNKEREDAAQGIWFDNAFSLCELSNINPPRKQKILPLLVGAILSEDFINNKDKWAKFKIFWNTHKIGRTSLKSKCKEIEEARKNSGNAFKIDYEEALNHPEHSNNKALIKIIQTIPDIIQAIQSHLGHNDSQALIYHNPFSLSQLYTILETKRDGFHKNCVAVTCENYWRSQKTEIDPEISYASRLPADSVRPFDGVLARMMQRLAYEIAMAKWEQIKHIPDNSSLLIPIYLEQNRFEFEESFKKIKGSSSDKTLEQAIEKQNIQWEEKFQRIINASMNICPYKGASIGGQGEIDHIYPRSLSKKHFGVIFNSEVNLIYCSSQGNREKKEEHYLLEHLSPLYLKHQFGTDNVSDIKNFISQNVANIKKYISFHLLTPEQQKAARHALFLDYDDEAFKTITKFLMSQQKARVNGTQKFLGKQIMEFLSTLADSKQLQLEFSIKQITAEEVHDHRELLSKQEPKLVKSRQQSFPSHAIDATLTMSIGLKEFPQFSQELDNSWFINHLMPDEVHLNPVRSKEKYNKPNISSTPLFKDSLYAERFIPVWVKGETFAIGFSEKDLFEIKPSNKEKLFTLLKTYSTKNPGESLQELQAKSKAKWLYFPINKTLALEFLHHYFHKEIVTPDDTTVCHFINSLRYYTKKESITVKILKEPMPVLSVKFESSKKNVLGSFKHTIALPATKDWERLFNHPNFLALKANPAPNPKEFNEFIRKYFLSDNNPNSDIPNNGHNIKPQKHKAVRKVFSLPVIPGNAGTMMRIRRKDNKGQPLYQLQTIDDTPSMGIQINEDRLVKQEVLMDAYKTRNLSTIDGINNSEGQAYATFDNWLTLPVSTFKPEIIKLEMKPHSKTRRYIRITQSLADFIKTIDEALMIKPSDSIDDPLNMPNEIVCKNKLFGNELKPRDGKMKIVSTGKIVTYEFESDSTPQWIQTLYVTQLKKQP

SEQ ID NO: 167 - protein, 1082 aa, Neisseria lactamica
MAAFKPNPMNYILGLDIGIASVGWAMVEVDEEENPIRLIDLGVRVFERAEVPKTGDSLAMARRLARSVRRLTRRRAHRLLRARRLLKREGVLQDADFDENGLVKSLPNTPWQLRAAALDRKLTCLEWSAVLLHLVKHRGYLSQRKNEGETADKELGALLKGVADNAHALQTGDFRTPAELALNKFEKESGHIRNQRGDYSHTFSRKDLQAELNLLFEKQKEFGNPHVSDGLKEDIETLLMAQRPALSGDAVQKMLGHCTFEPAEPKAAKNTYTAERFIWLTKLNNLRILEQGSERPLTDTERATLMDEPYRKSKLTYAQARKLLGLEDTAFFKGLRYGKDNAEASTLMEMKAYHAISRALEKEGLKDKKSPLNLSTELQDEIGTAFSLFKTDKDITGRLKDRVQPEILEALLKHISFDKFVQISLKALRRIVPLMEQGKRYDEACAEIYGDHYCKKNAEEKIYLPPIPADEIRNPVVLRALSQARKVINCVVRRYGSPARIHIETAREVGKSFKDRKEIEKRQEENRKDREKAAAKFREYFPNFVGEPKSKDILKLRLYEQQHGKCLYSGKEINLVRLNEKGYVEIDHALPFSRTWDDSFNNKVLVLGSENQNKGNQTPYEYFNGKDNSREWQEFKARVETSRFPRSKKQRILLQKFDEEGFKERNLNDTRYVNRFLCQFVADHILLTGKGKRRVFASNGQITNLLRGFWGLRKVRTENDRHHALDAVVVACSTVAMQQKITRFVRYKEMNAFDGKTIDKETGEVLHQKAHFPQPWEFFAQEVMIRVFGKPDGKPEFEEADTPEKLRTLLAEKLSSRPEAVHEYVTPLFVSRAPNRKMSGQGHMETVKSAKRLDEGISVLRVPLTQLKLKGLEKMVNREREPKLYDALKAQLETHKDDPAKAFAEPFYKYDKAGSRTQQVKAVRIEQVQKTGVWVRNHNGIADNATMVRVDVFEKGGKYYLVPIYSWQVAKGILPDRAVVAFKDEEDWTVMDDSFEFRFVLYANDLIKLTAKKNEFLGYFVSLNRATGAIDIRTHDTDSTKGKNGIFQSVGVKTALSFQKNQIDELGKEIRPCRLKKRPPVR

SEQ ID NO: 168 - protein, 1082 aa, Neisseria meningitidis; identical to SEQ ID NO: 152

SEQ ID NO: 169 - protein, 1187 aa, Bifidobacterium longum
MLSRQLLGASHLARPVSYSYNVQDNDVHCSYGERCFMRGKRYRIGIDVGLNSVGLAAVEVSDENSPVRLLNAQSVIHDGGVDPQKNKEAITRKNMSGVARRTRRMRRRKRERLHKLDMLLGKFGYPVIEPESLDKPFEEWHVRAELATRYIEDDELRRESISIALRHMARHRGWRNPYRQVDSLISDNPYSKQYGELKEKAKAYNDDATAAEEESTPAQLVVAMLDAGYAEAPRLRWRTGSKKPDAEGYLPVRLMQEDNANELKQIFRVQRVPADEWKPLFRSVFYAVSPKGSAEQRVGQDPLAPEQARALKASLAFQEYRIANVITNLRIKDASAELRKLTVDEKQSIYDQLVSPSSEDITWSDLCDFLGFKRSQLKGVGSLTEDGEERISSRPPRLTSVQRIYESDNKIRKPLVAWWKSASDNEHEAMIRLLSNTVDIDKVREDVAYASAIEFIDGLDDDALTKLDSVDLPSGRAAYSVETLQKLTRQMLTTDDDLHEARKTLFNVTDSWRPPADPIGEPLGNPSVDRVLKNVNRYLMNCQQRWGNPVSVNIEHVRSSFSSVAFARKDKREYEKNNEKRSIFRSSLSEQLRADEQMEKVRESDLRRLEAIQRQNGQCLYCGRTITFRTCEMDHIVPRKGVGSTNTRTNFAAVCAECNRMKSNTPFAIWARSEDAQTRGVSLAEAKKRVTMFTFNPKSYAPREVKAFKQAVIARLQQTEDDAAIDNRSIESVAWMADELHRRIDWYFNAKQYVNSASIDDAEAETMKTTVSVFQGRVTASARRAAGIEGKIHFIGQQSKTRLDRRHHAVDASVIAMMNTAAAQTLMERESLRESQRLIGLMPGERSWKEYPYEGTSRYESFHLWLDNMDVLLELLNDALDNDRIAVMQSQRYVLGNSIAHDATIHPLEKVPLGSAMSADLIRRASTPALWCALTRLPDYDEKEGLPEDSHREIRVHDTRYSADDEMGFFASQAAQIAVQEGSADIGSAIHHARVYRCWKTNAKGVRKYFYGMIRVFQTDLLRACHDDLFTVPLPPQSISMRYGEPRVVQALQSGNAQYLGSLVVGDEIEMDFSSLDVDGQIGEYLQFFSQFSGGNLAWKHWVVDGFFNQTQLRIRPRYLAAEGLAKAFSDDVVPDGVQKIVTKQGWLPPVNTASKTAVRIVRRNAFGEPRLSSAHHMPCSWQWRHE

SEQ ID NO: 170 - protein, 1101 aa, Akkermansia muciniphila
MSRSLTFSFDIGYASIGWAVIASASHDDADPSVCGCGTVLFPKDDCQAFKRREYRRLRRNIRSRRVRIERIGRLLVQAQIITPEMKETSGHPAPFYLASEALKGHRTLAPIELWHVLRWYAHNRGYDNNASWSNSLSEDGGNGEDTERVKHAQDLMDKHGTATMAETICRELKLEEGKADAPMEVSTPAYKNLNTAFPRLIVEKEVRRILELSAPLIPGLTAEIIELIAQHHPLTTEQRGVLLQHGIKLARRYRGSLLFGQLIPRFDNRIISRCPVTWAQVYEAELKKGNSEQSARERAEKLSKVPTANCPEFYEYRMARILCNIRADGEPLSAEIRRELMNQARQEGKLTKASLEKAISSRLGKETETNVSNYFTLHPDSEEALYLNPAVEVLQRSGIGQILSPSVYRIAANRLRRGKSVTPNYLLNLLKSRGESGEALEKKIEKESKKKEADYADTPLKPKYATGRAPYARTVLKKVVEEILDGEDPTRPARGEAHPDGELKAHDGCLYCLLDTDSSVNQHQKERRLDTMTNNHLVRHRMLILDRLLKDLIQDFADGQKDRISRVCVEVGKELTTFSAMDSKKIQRELTLRQKSHTDAVNRLKRKLPGKALSANLIRKCRIAMDMNWTCPFTGATYGDHELENLELEHIVPHSFRQSNALSSLVLTWPGVNRMKGQRTGYDFVEQEQENPVPDKPNLHICSLNNYRELVEKLDDKKGHEDDRRRKKKRKALLMVRGLSHKHQSQNHEAMKEIGMTEGMMTQSSHLMKLACKSIKTSLPDAHIDMIPGAVTAEVRKAWDVFGVFKELCPEAADPDSGKILKENLRSLTHLHHALDACVLGLIPYIIPAHHNGLLRRVLAMRRIPEKLIPQVRPVANQRHYVLNDDGRMMLRDLSASLKENIREQLMEQRVIQHVPADMGGALLKETMQRVLSVDGSGEDAMVSLSKKKDGKKEKNQVKASKLVGVFPEGPSKLKALKAAIEIDGNYGVALDPKPVVIRHIKVFKRIMALKEQNGGKPVRILKKGMLIHLTSSKDPKHAGVWRIESIQDSKGGVKLDLQRAHCAVPKNKTHECNWREVDLISLLKKYQMKRYPTSYTGTPR

SEQ ID NO: 171 - protein, 1498 aa, Odoribacter laneus
METTLGIDLGTNSIGLALVDQEEHQILYSGVRIFPEGINKDTIGLGEKEESRNATRRAKRQMRRQYFRKKLRKAKLLELLIAYDMCPLKPEDVRRWKNWDKQQKSTVRQFPDTPAFREWLKQNPYELRKQAVTEDVTRPELGRILYQMIQRRGFLSSRKGKEEGKIFTGKDRMVGIDETRKNLQKQTLGAYLYDIAPKNGEKYRFRTERVRARYTLRDMYIREFEIIWQRQAGHLGLAHEQATRKKNIFLEGSATNVRNSKLITHLQAKYGRGHVLIEDTRITVTFQLPLKEVLGGKIEIEEEQLKFKSNESVLFWQRPLRSQKSLLSKCVFEGRNFYDPVHQKWIIAGPTPAPLSHPEFEEFRAYQFINNIIYGKNEHLTAIQREAVFELMCTESKDFNFEKIPKHLKLFEKFNFDDTTKVPACTTISQLRKLFPHPVWEEKREEIWHCFYFYDDNTLLFEKLQKDYALQTNDLEKIKKIRLSESYGNVSLKAIRRINPYLKKGYAYSTAVLLGGIRNSFGKRFEYFKEYEPEIEKAVCRILKEKNAEGEVIRKIKDYLVHNRFGFAKNDRAFQKLYHHSQAITTQAQKERLPETGNLRNPIVQQGLNELRRTVNKLLATCREKYGPSFKFDHIHVEMGRELRSSKTEREKQSRQIRENEKKNEAAKVKLAEYGLKAYRDNIQKYLLYKEIEEKGGTVCCPYTGKTLNISHTLGSDNSVQIEHIIPYSISLDDSLANKTLCDATFNREKGELTPYDFYQKDPSPEKWGASSWEEIEDRAFRLLPYAKAQRFIRRKPQESNEFISRQLNDTRYISKKAVEYLSAICSDVKAFPGQLTAELRHLWGLNNILQSAPDITFPLPVSATENHREYYVITNEQNEVIRLFPKQGETPRTEKGELLLTGEVERKVFRCKGMQEFQTDVSDGKYWRRIKLSSSVTWSPLFAPKPISADGQIVLKGRIEKGVFVCNQLKQKLKTGLPDGSYWISLPVISQTFKEGESVNNSKLTSQQVQLFGRVREGIFRCHNYQCPASGADGNFWCTLDTDTAQPAFTPIKNAPPGVGGGQIILTGDVDDKGIFHADDDLHYELPASLPKGKYYGIFTVESCDPTLIPIELSAPKTSKGENLIEGNIWVDEHTGEVRFDPKKNREDQRHHAIDAIVIALSSQSLFQRLSTYNARRENKKRGLDSTEHFPSPWPGFAQDVRQSVVPLLVSYKQNPKTLCKISKTLYKDGKKIHSCGNAVRGQLHKETVYGQRTAPGATEKSYHIRKDIRELKTSKHIGKVVDITIRQMLLKHLQENYHIDITQEFNIPSNAFFKEGVYRIFLPNKHGEPVPIKKIRMKEELGNAERLKDNINQYVNPRNNHHVMIYQDADGNLKEEIVSFWSVIERQNQGQPIYQLPREGRNIVSILQINDTFLIGLKEEEPEVYRNDLSTLSKHLYRVQKLSGMYYTFRHHLASTLNNEREEFRIQSLEAWKRANPVKVQIDEIGRITFLNGPLC

SEQ ID NO: 172 - protein, 1300 aa, Francisella tularensis subsp. Novicida
MSIYQEFVNKYSLSKTLRFELIPQGKTLENIKARGLILDDEKRAKDYKKAKQIIDKYHQFFIEEILSSVCISEDLLQNYSDVYFKLKKSDDDNLQKDFKSAKDTIKKQISEYIKDSEKFKNLFNQNLIDAKKGQESDLILWLKQSKDNGIELFKANSDITDIDEALEIIKSFKGWTTYFKGFHENRKNVYSSNDIPTSIIYRIVDDNLPKFLENKAKYESLKDKAPEAINYEQIKKDLAEELTFDIDYKTSEVNQRVFSLDEVFEIANFNNYLNQSGITKFNTIIGGKFVNGENTKRKGINEYINLYSQQINDKTLKKYKMSVLFKQILSDTESKSFVIDKLEDDSDVVTTMQSFYEQIAAFKTVEEKSIKETLSLLFDDLKAQKLDLSKIYFKNDKSLTDLSQQVFDDYSVIGTAVLEYITQQIAPKNLDNPSKKEQELIAKKTEKAKYLSLETIKLALEEFNKHRDIDKQCRFEEILANFAAIPMIFDEIAQNKDNLAQISIKYQNQGKKDLLQASAEDDVKAIKDLLDQTNNLLHKLKIFHISQSEDKANILDKDEHFYLVFEECYFELANIVPLYNKIRNYITQKPYSDEKFKLNFENSTLANGWDKNKEPDNTAILFIKDDKYYLGVMNKKNNKIFDDKAIKENKGEGYKKIVYKLLPGANKMLPKVFFSAKSIKFYNPSEDILRIRNHSTHTKNGSPQKGYEKFEFNIEDCRKFIDFYKQSISKHPEWKDFGFRFSDTQRYNSIDEFYREVENQGYKLTFENISESYIDSVVNQGKLYLFQIYNKDFSAYSKGRPNLHTLYWKALFDERNLQDVVYKLNGEAELFYRKQSIPKKITHPAKEAIANKNKDNPKKESVFEYDLIKDKRFTEDKFFFHCPITINFKSSGANKFNDEINLLLKEKANDVHILSIDRGERHLAYYTLVDGKGNIIKQDTFNIIGNDRMKTNYHDKLAAIEKDRDSARKDWKKINNIKEMKEGYLSQVVHEIAKLVIEYNAIVVFEDLNFGFKRGRFKVEKQVYQKLEKMLIEKLNYLVFKDNEFDKTGGVLRAYQLTAPFETFKKMGKQTGIIYYVPAGFTSKICPVTGFVNQLYPKYESVSKSQEFFSKFDKICYNLDKGYFEFSFDYKNFGDKAAKGKWTIASFGSRLINFRNSDKNHNWDTREVYPTKELEKLLKDYSIEYGHGECIKAAICGESDKKFFAKLTSVLNTILQMRNSKTGTELDYLISPVADVNGNFFDSRQAPKNMPQDADANGAYHIGLKGLMLLGRIKNNQEGKKLNLVIKNEEYFEFVQNRNN

SEQ ID NO: 173 - protein, 1228 aa, Lachnospiraceae bacterium sp. ND2006
AASKLEKFTNCYSLSKTLRFKAIPVGKTQENIDNKRLLVEDEKRAEDYKGVKKLLDRYYLSFINDVLHSIKLKNLNNYISLFRKKTRTEKENKELENLEINLRKEIAKAFKGAAGYKSLFKKDIIETILPEAADDKDEIALVNSFNGFTTAFTGFFDNRENMFSEEAKSTSIAFRCINENLTRYISNMDIFEKVDAIFDKHEVQEIKEKILNSDYDVEDFFEGEFFNFVLTQEGIDVYNAIIGGFVTESGEKIKGLNEYINLYNAKTKQALPKFKPLYKQVLSDRESLSFYGEGYTSDEEVLEVFRNTLNKNSEIFSSIKKLEKLFKNFDEYSSAGIFVKNGPAISTISKDIFGEWNLIRDKWNAEYDDIHLKKKAVVTEKYEDDRRKSFKKIGSFSLEQLQEYADADLSVVEKLKEIIIQKVDEIYKVYGSSEKLFDADFVLEKSLKKNDAVVAIMKDLLDSVKSFENYIKAFFGEGKETNRDESFYGDFVLAYDILLKVDHIYDAIRNYVTQKPYSKDKFKLYFQNPQFMGGWDKDKETDYRATILRYGSKYYLAIMDKKYAKCLQKIDKDDVNGNYEKINYKLLPGPNKMLPKVFFSKKWMAYYNPSEDIQKIYKNGTFKKGDMFNLNDCHKLIDFFKDSISRYPKWSNAYDFNFSETEKYKDIAGFYREVEEQGYKVSFESASKKEVDKLVEEGKLYMFQIYNKDFSDKSHGTPNLHTMYFKLLFDENNHGQIRLSGGAELFMRRASLKKEELVVHPANSPIANKNPDNPKKTTTLSYDVYKDKRFSEDQYELHIPIAINKCPKNIFKINTEVRVLLKHDDNPYVIGIDRGERNLLYIVVVDGKGNIVEQYSLNEIINNFNGIRIKTDYHSLLDKKEKERFEARQNWTSIENIKELKAGYISQVVHKICELVEKYDAVIALEDLNSGFKNSRVKVEKQVYQKFEKMLIDKLNYMVDKKSNPCATGGALKGYQITNKFESFKSMSTQNGFIFYIPAWLTSKIDPSTGFVNLLKTKYTSIADSKKFISSFDRIMYVPEEDLFEFALDYKNFSRTDADYIKKWKLYSYGNRIRIFAAAKKNNVFAWEEVCLTSAYKELFNKYGINYQQGDIRALLCEQSDKAFYSSFMALMSLMLQMRNSITGRTDVDFLISPVKNSDGIFYDSRNYEAQENAILPKNADANGAYNIARKVLWAIGQFKKAEDEKLDKVKIAISNKEWLEYAQTSVK

SEQ ID NO: 174 - protein, 1307 aa, Acidaminococcus sp. BV3L6
MTQFEGFTNLYQVSKTLRFELIPQGKTLKHIQEQGFIEEDKARNDHYKELKPIIDRIYKTYADQCLQLVQLDWENLSAAIDSYRKEKTEETRNALIEEQATYRNAIHDYFIGRTDNLTDAINKRHAEIYKGLFKAELFNGKVLKQLGTVTTTEHENALLRSFDKFTTYFSGFYENRKNVFSAEDISTAIPHRIVQDNFPKFKENCHIFTRLITAVPSLREHFENVKKAIGIFVSTSIEEVFSFPFYNQLLTQTQIDLYNQLLGGISREAGTEKIKGLNEVLNLAIQKNDETAHIIASLPHRFIPLFKQILSDRNTLSFILEEFKSDEEVIQSFCKYKTLLRNENVLETAEALFNELNSIDLTHIFISHKKLETISSALCDHWDTLRNALYERRISELTGKITKSAKEKVQRSLKHEDINLQEIISAAGKELSEAFKQKTSEILSHAHAALDQPLPTTLKKQEEKEILKSQLDSLLGLYHLLDWFAVDESNEVDPEFSARLTGIKLEMEPSLSFYNKARNYATKKPYSVEKFKLNFQMPTLASGWDVNKEKNNGAILFVKNGLYYLGIMPKQKGRYKALSFEPTEKTSEGFDKMYYDYFPDAAKMIPKCSTQLKAVTAHFQTHTTPILLSNNFIEPLEITKEIYDLNNPEKEPKKFQTAYAKKTGDQKGYREALCKWIDFTRDFLSKYTKTTSIDLSSLRPSSQYKDLGEYYAELNPLLYHISFQRIAEKEIMDAVETGKLYLFQIYNKDFAKGHHGKPNLHTLYWTGLFSPENLAKTSIKLNGQAELFYRPKSRMKRMAHRLGEKMLNKKLKDQKTPIPDTLYQELYDYVNHRLSHDLSDEARALLPNVITKEVSHEIIKDRRFTSDKFFFHVPITLNYQAANSPSKFNQRVNAYLKEHPETPIIGIDRGERNLIYITVIDSTGKILEQRSLNTIQQFDYQKKLDNREKERVAARQAWSVVGTIKDLKQGYLSQVIHEIVDLMIHYQAVVVLENLNFGFKSKRTGIAEKAVYQQFEKMLIDKLNCLVLKDYPAEKVGGVLNPYQLTDQFTSFAKMGTQSGFLFYVPAPYTSKIDPLTGFVDPFVWKTIKNHESRKHFLEGFDFLHYDVKTGDFILHFKMNRNLSFQRGLPGFMPAWDIVFEKNETQFDAKGTPFIAGKRIVPVIENHRFTGRYRDLYPANELIALLEEKGIVFRDGSNILPKLLENDDSHAIDTMVALIRSVLQMRNSNAATGEDYINSPVRDLNGVCFDSRFQNPEWPMDADANGAYHIALKGQLLLNHLKESKDLKLQNGISNQDWLAYIQELRN

SEQ ID NO: 175 - DNA, 28 bp, Leptotrichia shahii
ccaccccaatatcgaaggggactaaaac

SEQ ID NO: 176 - DNA, 36 bp, Leptotrichia wadei
gatttagactaccccaaaaacgaaggggactaaaac

SEQ ID NO: 177 - DNA, 36 bp, Listeria seeligeri
gtaagagactacctctatatgaaagaggactaaaac

SEQ ID NO: 178 - DNA, 35 bp, Lachnospiraceae bacterium MA2020
gtattgagaaaagccagatatagttggcaatagac

SEQ ID NO: 179 - DNA, 35 bp, Lachnospiraceae bacterium NK4A179
gttgatgagaagagcccaagatagagggcaataac

SEQ ID NO: 180 - DNA, 35 bp, Clostridium aminophilum DSM 10710
gtctattgccctctatatcgggctgttctccaaac

SEQ ID NO: 181 - DNA, 36 bp, Carnobacterium gallinarum DSM 4847
attaaagactacctctaaatgtaagaggactataac

SEQ ID NO: 182 - DNA, 36 bp, Carnobacterium gallinarum DSM 4847
aatataaactacctctaaatgtaagaggactataac

SEQ ID NO: 183 - DNA, 36 bp, Paludibacter propionicigenes WB4
cttgtggattatcccaaaattgaagggaactacaac

SEQ ID NO: 184 - DNA, 36 bp, Listeria weihenstephanensis FSL R9-0317
gatttagagtacctcaaaatagaagaggtctaaaac

SEQ ID NO: 185 - DNA, 36 bp, Listeriaceae bacterium FSL M6-0635
gatttagagtacctcaaaacaaaagaggactaaaac

SEQ ID NO: 186 - DNA, 36 bp, Leptotrichia wadei F0279
gatatagataaccccaaaaacgaagggatctaaaac

SEQ ID NO: 187 - DNA, 36 bp, Rhodobacter capsulatus SB 1003
gcctcacatcaccgccaagacgacggcggactgaac

SEQ ID NO: 188 - DNA, 36 bp, Rhodobacter capsulatus R121; identical to SEQ ID NO: 187

SEQ ID NO: 189 - DNA, 36 bp, Rhodobacter capsulatus DE442; identical to SEQ ID NO: 187

SEQ ID NO: 190 - protein, 1389 aa, Unknown
  Cas13a
MGNLFGHKRWYEVRDKKDFKIKRKVKVKRNYDGNKYILNINENNNKEKIDNNKFIRKYINYKKNDNILKEFTRKFHAGNILFKLKGKEGIIRIENNDDFLETEEVVLYIEAYGKSEKLKALGITKKKIIDEAIRQGITKDDKKIEIKRQENEEEIEIDIRDEYTNKTLNDCSIILRIIENDELETKKSIYEIFKNINMSLYKIIEKIIENETEKVFENRYYEEHLREKLLKDDKIDVILTNFMEIREKIKSNLEILGFVKFYLNVGGDKKKSKNKKMLVEKILNINVDLTVEDIADFVIKELEFWNITKRIEKVKKVNNEFLEKRRNRTYIKSYVLLDKHEKFKIERENKKDKIVKFFVENIKNNSIKEKIEKILAEFKIDELIKKLEKELKKGNCDTEIFGIFKKHYKVNFDSKKFSKKSDEEKELYKIIYRYLKGRIEKILVNEQKVRLKKMEKIEIEKILNESILSEKILKRVKQYTLEHIMYLGKLRHNDIDMTTVNTDDFSRLHAKEELDLELITFFASTNMELNKIFSRENINNDENIDFFGGDREKNYVLDKKILNSKIKIIRDLDFIDNKNNITNNFIRKFTKIGTNERNRILHAISKERDLQGTQDDYNKVINIIQNLKISDEEVSKALNLDVVFKDKKNIITKINDIKISEENNNDIKYLPSFSKVLPEILNLYRNNPKNEPFDTIETEKIVLNALIYVNKELYKKLILEDDLEENESKNIFLQELKKTLGNIDEIDENIIENYYKNAQISASKGNNKAIKKYQKKVIECYIGYLRKNYEELFDFSDFKMNIQEIKKQIKDINDNKTYERITVKTSDKTIVINDDFEYIISIFALLNSNAVINKIRNRFFATSVWLNTSEYQNIIDILDEIMQLNTLRNECITENWNLNLEEFIQKMKEIEKDFDDFKIQTKKEIFNNYYEDIKNNILTEFKDDINGCDVLEKKLEKIVIFDDETKFEIDKKSNILQDEQRKLSNINKKDLKKKVDQYIKDKDQEIKSKILCRIIFNSDFLKKYKKEIDNLIEDMESENENKFQEIYYPKERKNELYIYKKNLFLNIGNPNFDKIYGLISNDIKMADAKFLFNIDGKNIRKNKISEIDAILKNLNDKLNGYSKEYKEKYIKKLKENDDFFAKNIQNKNYKSFEKDYNRVSEYKKIRDLVEFNYLNKIESYLIDINWKLAIQMARFERDMHYIVNGLRELGIIKLSGYNTGISRAYPKRNGSDGFYTTTAYYKFFDEESYKKFEKICYGFGIDLSENSEINKPENESIRNYISHFYIVRNPFADYSIAEQIDRVSNLLSYSTRYNNSTYASVFEVFKKDVNLDYDELKKKFKLIGNNDILERLMKPKKVSVLELESYNSDYIKNLIIELLTKIENTNDTL

SEQ ID NO: 191 - protein, 1221 aa, Bergeyella zoohelcum ATCC 43767
MENKTSLGNNIYYNPFKPQDKSYFAGYFNAAMENTDSVFRELGKRLKGKEYTSENFFDAIFKENISLVEYERYVKLLSDYFPMARLLDKKEVPIKERKENFKKNFKGIIKAVRDLRNFYTHKEHGEVEITDEIFGVLDEMLKSTVLTVKKKKVKTDKTKEILKKSIEKQLDILCQKKLEYLRDTARKIEEKRRNQRERGEKELVAPFKYSDKRDDLIAAIYNDAFDVYIDKKKDSLKESSKAKYNTKSDPQQEEGDLKIPISKNGVVFLLSLFLTKQEIHAFKSKIAGFKATVIDEATVSEATVSHGKNSICFMATHEIFSHLAYKKLKRKVRTAEINYGEAENAEQLSVYAKETLMMQMLDELSKVPDVVYQNLSEDVQKTFIEDWNEYLKENNGDVGTMEEEQVIHPVIRKRYEDKFNYFAIRFLDEFAQFPTLRFQVHLGNYLHDSRPKENLISDRRIKEKITVFGRLSELEHKKALFIKNTETNEDREHYWEIFPNPNYDFPKENISVNDKDFPIAGSILDREKQPVAGKIGIKVKLLNQQYVSEVDKAVKAHQLKQRKASKPSIQNIIEEIVPINESNPKEAIVFGGQPTAYLSMNDIHSILYEFFDKWEKKKEKLEKKGEKELRKEIGKELEKKIVGKIQAQIQQIIDKDTNAKILKPYQDGNSTAIDKEKLIKDLKQEQNILQKLKDEQTVREKEYNDFIAYQDKNREINKVRDRNHKQYLKDNLKRKYPEAPARKEVLYYREKGKVAVWLANDIKRFMPTDFKNEWKGEQHSLLQKSLAYYEQCKEELKNLLPEKVFQHLPFKLGGYFQQKYLYQFYTCYLDKRLEYISGLVQQAENFKSENKVFKKVENECFKFLKKQNYTHKELDARVQSILGYPIFLERGFMDEKPTIIKGKTFKGNEALFADWFRYYKEYQNFQTFYDTENYPLVELEKKQADRKRKTKIYQQKKNDVFTLLMAKHIFKSVFKQDSIDQFSLEDLYQSREERLGNQERARQTGERNTNYIWNKTVDLKLCDGKITVENVKLKNVGDFIKYEYDQRVQAFLKYEENIEWQAFLIKESKEEENYPYVVEREIEQYEKVRREELLKEVHLIEEYILEKVKDKEILKKGDNQNFKYYILNGLLKQLKNEDVESYKVFNLNTEPEDVNINQLKQEATDLEQKAFVLTYIRNKFAHNQLPKKEFWDYCQEKYGKEKTYAEYFAEVFKKEKEALIK

SEQ ID NO: 192 - DNA, 21 bp, Artificial Sequence
  GAPDH F primer
cagcctcaagatcatcagcaa

SEQ ID NO: 193 - DNA, 20 bp, Artificial Sequence
  GAPDH R primer
tgtggtcatgagtccttcca

SEQ ID NO: 194 - DNA, 20 bp, Artificial Sequence
  NS5 F primer
gaggagagtgccagagttgt

SEQ ID NO: 195 - DNA, 20 bp, Artificial Sequence
  NS5 R primer
tctctctccccatccagtga

SEQ ID NO: 196 - DNA, 23 bp, Artificial Sequence
  NS5-targeting spacer 1
gcaatgatcttcatgttgggagc

SEQ ID NO: 197 - DNA, 22 bp, Artificial Sequence
  NS5-targeting spacer 2
gaaccttgttgatgaactcttc

SEQ ID NO: 198 - DNA, 22 bp, Artificial Sequence
  NS5-targeting spacer 3
gttggtgattagagcttcattc

SEQ ID NO: 199 - DNA, 23 bp, Artificial Sequence
  NS5-targeting spacer 4
gagtgatcctcgttcaagaatcc

SEQ ID NO: 200 - DNA, 20 bp, Artificial Sequence
  Non-targeting control spacer (lambda2)
gtgataagtggaatgccatg

SEQ ID NO: 201 - RNA, 114 nt, Artificial Sequence
  sgRNA scaffold
  misc_feature (2)..(21): n is a, c, g, or u
gnnnnnnnnnnnnnnnnnnnnguuuaagagcuaugcuggaaacagcauagcaaguuuaaauaaggcuaguccguuaucaacuugaaaaaguggcaccgagucggugcuuuuuuu

SEQ ID NO: 202 - DNA, 4991 bp, Artificial Sequence
  E43-CjeCas9 and sgRNA plasmid
  misc_feature (297)..(315): n is a, c, g, t or u
gtttattacagggacagcagagatccagtttggttaattaaggtaccgagggcctatttcccatgattccttcatatttgcatatacgatacaaggctgttagagagataattagaattaatttgactgtaaacacaaagatattagtacaaaatacgtgacgtagaaagtaataatttcttgggtagtttgcagttttaaaattatgttttaaaatggactatcatatgcttaccgtaacttgaaagtatttcgatttcttggctttatatatcttgtggaaaggacgaaacaccnnnnnnnnnnnnnnnnnnngttttagtccctgaagggactaaaataaagagtttgcgggactctgcggggttacaatcccctaaaaccgctttttttcctgcagcccgggggatccactagttctagagcggccgccaccgcggtggagctccagcttttgttccctttagtgagggttaattgcgcgaattcgctagctaggtcttgaaaggagtgggaattggctccggtgcccgtcagtgggcagagcgcacatcgcccacagtccccgagaagttggggggaggggtcggcaattgatccggtgcctagagaaggtggcgcggggtaaactgggaaagtgatgtcgtgtactggctccgcctttttcccgagggtgggggagaaccgtatataagtgcagtagtcgccgtgaacgttctttttcgcaacgggtttgccgccagaacacaggaccggttctagagcgctatttagaaccatgtgttctccccaagaatctggcatgaccgctctttcagcgaggatgttgacgcgaagcagatccctgggacctggggccgggccacgagggtgtcgggaagaaccaggaccgttgcgacggagggaagcagcagcggaagctcggaaatcccattctccggttaaacgaccccgcaaggcacaacggctcagggttgcttacgaggggagcgattccgaaaagggtgaaggagcagagcccttgaaggttccagtatgggaaccccaggattggcagcagcagcttgtaaacatccgagcaatgaggaacaaaaaagatgcacctgttgatcacctcggaaccgaacattgttatgattctagtgcgccgccaaaagtccgccggtatcaggttctgttgagtttgatgctgagtagtcagactaaggaccaggttacggccggagcaatgcaacggcttcgggcacggggactcacggtcgatagcattttgcagaccgatgacgcaacattgggtaaactcatatatccagttggcttctggcggagcaaagtgaagtacatcaagcagacctcagccattctccaacaacattacggaggtgatatacccgcaagcgtagctgaactggtagcactgccgggcgtcggtcccaaaatggcacatctggctatggcggttgcttggggaacggtgtctggtatcgcagttgatacgcatgtccaccgcatcgccaatcggctgaggtggactaaaaaagccactaagtctcctgaagaaacacgggctgctctggaagagtggcttccacgagagctgtggcatgaaatcaatggattgctggttggtttcgggcagcagacatgcttgcccgtgcacccccggtgtcatgcttgcttgaaccaggctttgtgcccagctgcccagggcctgagtggaagtgagacaccgggaacatctgagtctgcgaccccggagagcacaaacgcgcgaatcctggccttcgcgattggcattagcagcatcggctgggcattctctgaaaacgacgaactgaaggattgcggcgtgcgaattttcactaaggtcgaaaatcccaaaactggtgaatcactcgctctccctagacgactggcacgctccgcacgaaagaggcttgcccgccgcaaggcacgcttgaaccatcttaaacaccttattgcaaatgagtttaaactgaattatgaggactaccaatcctttgacgagtctcttgctaaagcctacaaagggagccttatatccccgtatgagctccggttcagagcactcaacgaactgctgtccaaacaggattttgctcgcgtgattctccacatagcgaagaggcgaggatacgatgacattaaaaacagtgatgataaggaaaaaggggccatactcaaagcgattaagcaaaatgaagagaagctcgctaactatcaatcagtaggggagtatctctataaagagtacttccagaagttcaaagaaaatagcaaggaatttactaatgtccggaataaaaaggagtcttacgaaagatgtattgcgcaatctttcctcaaggacgagctcaaattgattttcaagaaacaaagggaatttgggttcagcttctcaaaaaaatttgaggaagaggttctgagcgttgccttttacaaacgcgcccttaaggacttctcacatctcgtagggaattgtagtttcttcaccgatgaaaaacgggcgccaaaaaatagccctttggcttttatgtttgtcgctctgactcgcatcattaatctgctcaacaaccttaaaaacacggaagggattctgtacacaaaggatgatctgaacgctctgcttaacgaagttttgaagaacgggactttgacctacaaacaaaccaaaaagcttcttggtctcagtgatgactacgaattcaagggagaaaaagggacatatttcatcgaattcaagaagtataaggagttcatcaaagccttgggcgagcacaacttgtctcaagatgatctcaacgaaattgctaaggatatcactctgattaaagacgagatcaagctcaaaaaggcgttggcgaagtatgaccttaaccaaaaccaaatagatagcctcagcaagttggaatttaaagatcacttgaatataagtttcaaggcccttaagttggtcacccccttgatgcttgaaggaaagaaatatgatgaggcatgtaatgagctgaatctcaaggttgctattaacgaagacaaaaaagatttcctcccagctttcaatgagacttactataaggacgaggttaccaatcctgtggtgctccgagccatcaaagagtatcgaaaggtcctgaatgctttgctcaaaaaatacggtaaggtacacaaaataaatattgagctcgcaagggaggtcggtaagaaccactcccagcgcgccaaaatagaaaaggaacagaatgaaaattacaaagcgaaaaaggacgccgagctcgagtgcgaaaagctgggcctgaaaataaacagcaagaacattctcaaactccgcctcttcaaagaacaaaaagaattttgtgcttatagtggtgagaaaataaaaatctccgatcttcaagacgagaagatgctcgaaatagacgcgatatatccatatagcaggtcttttgacgattcttacatgaataaagtgcttgttttcactaagcagaatcaggaaaagttgaatcagaccccctttgaggcctttggcaacgactcagcaaagtggcagaagatcgaggtcttggctaagaatcttcctactaagaaacagaaaaggatattggataagaactataaagacaaagaacaaaagaactttaaagaccgcaacctcaatgacaccagatacatagcaagattggttctgaactacacaaaagattatttggacttcttgccgctgtctgatgatgagaacacgaaactcaacgacacgcaaaaggggtctaaagtccacgtcgaagctaaatctgggatgctcacctcagcattgaggcatacgtggggattctcagcaaaggaccgaaacaatcacctgcaccatgccattgacgcagttatcatagcgtatgccaataattcaatagtaaaagcgtttagcgacttcaagaaggaacaagagtccaacagcgccgagctctacgcaaaaaagattagtgaactcgactacaaaaacaaaagaaaattctttgagccgttcagcggatttcgacagaaggtattggataaaatagatgaaattttcgtgagcaaacccgaaaggaaaaagccctcaggcgccttgcacgaagagactttcaggaaggaagaggaattctaccaaagctacggcggaaaagagggagttttgaaggctctcgaacttggaaagattaggaaggtgaacggcaagatagtgaaaaacggcgatatgttccgggttgatatcttcaaacataaaaaaacgaataaattttatgctgtgcctatatacactatggacttcgcacttaaggtcctgccgaataaggcggtagcccgatctaaaaaaggcgaaattaaggactggattttgatggatgaaaattacgagttctgcttttctctctacaaggattcccttatattgatacagacgaaagatatgcaggaaccggaattcgtgtattacaacgcttttacttcctctacggtatctttgattgtctccaaacatgacaacaaattcgaaacactcagtaaaaaccaaaagattctctttaaaaatgcgaacgagaaagaagtaattgcaaaatcaattggcatccaaaatttgaaagtttttgaaaaatatatagtatctgccctcggagaggttactaaagcggaatttagacagcgagaggacttcaaaaaatcaggtccacccaagaaaaaacgcaaggtggaagatccgaagaaaaagcgaaaagtggatgtgtaacgttttccgggacgccggctggatgatcctccagcgcggggatctcatgctggagttcttcgcccaccccaacttgtttattgcagcttataatggttacaaataaagcaatagcatcacaaatttcacaaataaagcatttttttcactgcattctagttgtggtttgtccaaactcatcaatgtatcttatcatgtctgtataccg

SEQ ID NO: 203 - DNA, 5270 bp, Artificial Sequence
  E67-CjeCas9 and sgRNA plasmid
  misc_feature (297)..(315): n is a, c, g, t or u
gtttattacagggacagcagagatccagtttggttaattaaggtaccgagggcctatttcccatgattccttcatatttgcatatacgatacaaggctgttagagagataattagaattaatttgactgtaaacacaaagatattagtacaaaatacgtgacgtagaaagtaataatttcttgggtagtttgcagttttaaaattatgttttaaaatggactatcatatgcttaccgtaacttgaaagtatttcgatttcttggctttatatatcttgtggaaaggacgaaacaccnnnnnnnnnnnnnnnnnnngttttagtccctgaagggactaaaataaagagtttgcgggactctgcggggttacaatcccctaaaaccgctttttttcctgcagcccgggggatccactagttctagagcggccgccaccgcggtggagctccagcttttgttccctttagtgagggttaattgcgcgaattcgctagctaggtcttgaaaggagtgggaattggctccggtgcccgtcagtgggcagagcgcacatcgcccacagtccccgagaagttggggggaggggtcggcaattgatccggtgcctagagaaggtggcgcggggtaaactgggaaagtgatgtcgtgtactggctccgcctttttcccgagggtgggggagaaccgtatataagtgcagtagtcgccgtgaacgttctttttcgcaacgggtttgccgccagaacacaggaccggttctagagcgctatttagaaccatgcaggaggtaatagcggggcttgagcgatttacctttgccttcgaaaaagacgtagagatgcagaagggaaccggcctgctcccatttcaaggtatggacaaatcagcatctgccgtgtgcaattttttcaccaagggtctgtgtgaaaaggggaagctctgtccatttcgccatgatcgcggagagaagatggtggtgtgtaagcactggctgagagggctttgcaaaaaaggcgaccactgcaaatttcttcaccaatatgacctgactcgaatgcctgagtgttatttttacagtaagttcggtgactgtagcaacaaagaatgcagcttcttgcatgtcaaaccagcattcaagtcacaggattgcccgtggtacgatcagggtttttgcaaggacggtcccctctgcaaatatcgacacgtacccagaattatgtgccttaattacctggtcggcttctgtcctgaagggccaaaatgtcagtttgctcaaaaaattcgcgagttcaaattgctccctgggtctaaaatttgggaaccccaggattggcagcagcagcttgtaaacatccgagcaatgaggaacaaaaaagatgcacctgttgatcacctcggaaccgaacattgttatgattctagtgcgccgccaaaagtccgccggtatcaggttctgttgagtttgatgctgagtagtcagactaaggaccaggttacggccggagcaatgcaacggcttcgggcacggggactcacggtcgatagcattttgcagaccgatgacgcaacattgggtaaactcatatatccagttggcttctggcggagcaaagtgaagtacatcaagcagacctcagccattctccaacaacattacggaggtgatatacccgcaagcgtagctgaactggtagcactgccgggcgtcggtcccaaaatggcacatctggctatggcggttgcttggggaacggtgtctggtatcgcagttgatacgcatgtccaccgcatcgccaatcggctgaggtggactaaaaaagccactaagtctcctgaagaaacacgggctgctctggaagagtggcttccacgagagctgtggcatgaaatcaatggattgctggttggtttcgggcagcagacatgcttgcccgtgcacccccggtgtcatgcttgcttgaaccaggctttgtgcccagctgcccagggcctgagtggaagtgagacaccgggaacatctgagtctgcgaccccggagagcacaaacgcgcgaatcctggccttcgcgattggcattagcagcatcggctgggcattctctgaaaacgacgaactgaaggattgcggcgtgcgaattttcactaaggtcgaaaatcccaaaactggtgaatcactcgctctccctagacgactggcacgctccgcacgaaagaggcttgcccgccgcaaggcacgcttgaaccatcttaaacaccttattgcaaatgagtttaaactgaattatgaggactaccaatcctttgacgagtctcttgctaaagcctacaaagggagccttatatccccgtatgagctccggttcagagcactcaacgaactgctgtccaaacaggattttgctcgcgtgattctccacatagcgaagaggcgaggatacgatgacattaaaaacagtgatgataaggaaaaaggggccatactcaaagcgattaagcaaaatgaagagaagctcgctaactatcaatcagtaggggagtatctctataaagagtacttccagaagttcaaagaaaatagcaaggaatttactaatgtccggaataaaaaggagtcttacgaaagatgtattgcgcaatctttcctcaaggacgagctcaaattgattttcaagaaacaaagggaatttgggttcagcttctcaaaaaaatttgaggaagaggttctgagcgttgccttttacaaacgcgcccttaaggacttctcacatctcgtagggaattgtagtttcttcaccgatgaaaaacgggcgccaaaaaatagccctttggcttttatgtttgtcgctctgactcgcatcattaatctgctcaacaaccttaaaaacacggaagggattctgtacacaaaggatgatctgaacgctctgcttaacgaagttttgaagaacgggactttgacctacaaacaaaccaaaaagcttcttggtctcagtgatgactacgaattcaagggagaaaaagggacatatttcatcgaattcaagaagtataaggagttcatcaaagccttgggcgagcacaacttgtctcaagatgatctcaacgaaattgctaaggatatcactctgattaaagacgagatcaagctcaaaaaggcgttggcgaagtatgaccttaaccaaaaccaaatagatagcctcagcaagttggaatttaaagatcacttgaatataagtttcaaggcccttaagttggtcacccccttgatgcttgaaggaaagaaatatgatgaggcatgtaatgagctgaatctcaaggttgctattaacgaagacaaaaaagatttcctcccagctttcaatgagacttactataaggacgaggttaccaatcctgtggtgctccgagccatcaaagagtatcgaaaggtcctgaatgctttgctcaaaaaatacggtaaggtacacaaaataaatattgagctcgcaagggaggtcggtaagaaccactcccagcgcgccaaaatagaaaaggaacagaatgaaaattacaaagcgaaaaaggacgccgagctcgagtgcgaaaagctgggcctgaaaataaacagcaagaacattctcaaactccgcctcttcaaagaacaaaaagaattttgtgcttatagtggtgagaaaataaaaatctccgatcttcaagacgagaagatgctcgaaatagacgcgatatatccatatagcaggtcttttgacgattcttacatgaataaagtgcttgttttcactaagcagaatcaggaaaagttgaatcagaccccctttgaggcctttggcaacgactcagcaaagtggcagaagatcgaggtcttggctaagaatcttcctactaagaaacagaaaaggatattggataagaactataaagacaaagaacaaaagaactttaaagaccgcaacctcaatgacaccagatacatagcaagattggttctgaactacacaaaagattatttggacttcttgccgctgtctgatgatgagaacacgaaactcaacgacacgcaaaaggggtctaaagtccacgtcgaagctaaatctgggatgctcacctcagcattgaggcatacgtggggattctcagcaaaggaccgaaacaatcacctgcaccatgccattgacgcagttatcatagcgtatgccaataattcaatagtaaaagcgtttagcgacttcaagaaggaacaagagtccaacagcgccgagctctacgcaaaaaagattagtgaactcgactacaaaaacaaaagaaaattctttgagccgttcagcggatttcgacagaaggtattggataaaatagatgaaattttcgtgagcaaacccgaaaggaaaaagccctcaggcgccttgcacgaagagactttcaggaaggaagaggaattctaccaaagctacggcggaaaagagggagttttgaaggctctcgaacttggaaagattaggaaggtgaacggcaagatagtgaaaaacggcgatatgttccgggttgatatcttcaaacataaaaaaacgaataaattttatgctgtgcctatatacactatggacttcgcacttaaggtcctgccgaataaggcggtagcccgatctaaaaaaggcgaaattaaggactggattttgatggatgaaaattacgagttctgcttttctctctacaaggattcccttatattgatacagacgaaagatatgcaggaaccggaattcgtgtattacaacgcttttacttcctctacggtatctttgattgtctccaaacatgacaacaaattcgaaacactcagtaaaaaccaaaagattctctttaaaaatgcgaacgagaaagaagtaattgcaaaatcaattggcatccaaaatttgaaagtttttgaaaaatatatagtatctgccctcggagaggttactaaagcggaatttagacagcgagaggacttcaaaaaatcaggtccacccaagaaaaaacgcaaggtggaagatccgaagaaaaagcgaaaagtggatgtgtaacgttttccgggacgccggctggatgatcctccagcgcggggatctcatgctggagttcttcgcccaccccaacttgtttattgcagcttataatggttacaaataaagcaatagcatcacaaatttcacaaataaagcatttttttcactgcattctagttgtggtttgtccaaactcatcaatgtatcttatcatgtctgtataccg

SEQ ID NO: 204 - protein, 137 aa, Unknown
  RNAseK
MGWLRPGPRPLCPPARASWAFSHRFPSPLAPRRSPTPFFMASLLCCGPKLAACGIVLSAWGVIMLIMLGIFFNVHSAVLIEDVPFTEKDFENGPQNIYNLYEQVSYNCFIAAGLYLLLGGFSFCQVRLNKRKEYMVR

SEQ ID NO: 205 - protein, 1245 aa, Unknown
  TALEN
MRIGKSSGWLNESVSLEYEHVSPPTRPRDTRRRPRAAGDGGLAHLHRRLAVGYAEDTPRTEARSPAPRRPLPVAPASAPPAPSLVPEPPMPVSLPAVSSPRFSAGSSAAITDPFPSLPPTPVLYAMARELEALSDATWQPAVPLPAEPPTDARRGNTVFDEASASSPVIASACPQAFASPPRAPRSARARRARTGGDAWPAPTFLSRPSSSRIGRDVFGKLVALGYSREQIRKLKQESLSEIAKYHTTLTGQGFTHADICRISRRRQSLRVVARNYPELAAALPELTRAHIVDIARQRSGDLALQALLPVATALTAAPLRLSASQIATVAQYGERPAIQALYRLRRKLTRAPLHLTPQQVVAIASNTGGKRALEAVCVQLPVLRAAPYRLSTEQVVAIASNKGGKQALEAVKAHLLDLLGAPYVLDTEQVVAIASHNGGKQALEAVKADLLDLRGAPYALSTEQVVAIASHNGGKQALEAVKADLLELRGAPYALSTEQVVAIASHNGGKQALEAVKAHLLDLRGVPYALSTEQVVAIASHNGGKQALEAVKAQLLDLRGAPYALSTAQVVAIASNGGGKQALEGIGEQLLKLRTAPYGLSTEQVVAIASHDGGKQALEAVGAQLVALRAAPYALSTEQVVAIASNKGGKQALEAVKAQLLELRGAPYALSTAQVVAIASHDGGNQALEAVGTQLVALRAAPYALSTEQVVAIASHDGGKQALEAVGAQLVALRAAPYALNTEQVVAIASSHGGKQALEAVRALFPDLRAAPYALSTAQLVAIASNPGGKQALEAVRALFRELRAAPYALSTEQVVAIASNHGGKQALEAVRALFRGLRAAPYGLSTAQVVAIASSNGGKQALEAVWALLPVLRATPYDLNTAQIVAIASHDGGKPALEAVWAKLPVLRGAPYALSTAQVVAIACISGQQALEAIEAHMPTLRQASHSLSPERVAAIACIGGRSAVEAVRQGLPVKAIRRIRREKAPVAGPPPASLGPTPQELVAVLHFFRAHQQPRQAFVDALAAFQATRPALLRLLSSVGVTEIEALGGTIPDATERWQRLLGRLGFRPATGAAAPSPDSLQGFAQSLERTLGSPGMAGQSACSPHRKRPAETAIAPRSIRRSPNNAGQPSEPWPDQLAWLQRRKRTARSHIRADSAASVPANLHLGTRAQFTPDRLRAEPGPIMQAHTSPASVSFGSHVAFEPGLPDPGTPTSADLASFEAEPFGVGPLDFHLDWLLQILET

SEQ ID NO: 206 - protein, 1373 aa, Unknown
  TALEN
MDPIRSRTPSPARELLPGPQPDRVQPTADRGGAPPAGGPLDGLPARRTMSRTRLPSPPAPSPAFSAGSFSDLLRQFDPSLLDTSLLDSMPAVGTPHTAAAPAECDEVQSGLRAADDPPPTVRVAVTAARPPRAKPAPRRRAAQPSDASPAAQVDLRTLGYSQQQQEKIKPKVGSTVAQHHEALVGHGFTHAHIVALSRHPAALGTVAVKYQDMIAALPEATHEDIVGVGKQWSGARALEALLTVAGELRGPPLQLDTGQLVKIAKRGGVTAVEAVHASRNALTGAPLNLTPAQVVAIASNNGGKQALETVQRLLPVLCQAHGLTPAQVVAIASHDGGKQALETMQRLLPVLCQAHGLPPDQVVAIASNIGGKQALETVQRLLPVLCQAHGLTPDQVVAIASHGGGKQALETVQRLLPVLCQAHGLTPDQVVAIASHDGGKQALETVQRLLPVLCQAHGLTPDQVVAIASNGGGKQALETVQRLLPVLCQAHGLTPDQVVAIASNGGKQALETVQRLLPVLCQAHGLTPDQVVAIASHDGGKQALETVQRLLPVLCQTHGLTPAQVVAIASHDGGKQALETVQQLLPVLCQAHGLTPDQVVAIASNIGGKQALATVQRLLPVLCQAHGLTPDQVVAIASNGGGKQALETVQRLLPVLCQAHGLTPDQVVAIASNGGGKQALETVQRLLPVLCQAHGLTQVQVVAIASNIGGKQALETVQRLLPVLCQAHGLTPAQVVAIASHDGGKQALETVQRLLPVLCQAHGLTPDQVVAIASNGGGKQALETVQRLLPVLCQAHGLTQEQVVAIASNNGGKQALETVQRLLPVLCQAHGLTPDQVVAIASNGGGKQALETVQRLLPVLCQAHGLTPAQVVAIASNIGGKQALETVQRLLPVLCQDHGLTLAQVVAIASNIGGKQALETVQRLLPVLCQAHGLTQDQVVAIASNIGGKQALETVQRLLPVLCQDHGLTPDQVVAIASNIGGKQALETVQRLLPVLCQDHGLTLDQVVAIASNGGKQALETVQRLLPVLCQDHGLTPDQVVAIASNSGGKQALETVQRLLPVLCQDHGLTPNQVVAIASNGGKQALESIVAQLSRPDPALAALTNDHLVALACLGGRPAMDAVKKGLPHAPELIRRVNRRIGERTSHRVADYAQVVRVLEFFQCHSHPAYAFDEAMTQFGMSRNGLVQLFRRVGVTELEARGGTLPPASQRWDRILQASGMKRAKPSPTSAQTPDQASLHAFADSLERDLDAPSPMHEGDQTGASSRKRSRSDRAVTGPSAQHSFEVRVPEQRDALHLPLSWRVKRPRTRIGGGLPDPGTPIAADLAASSTVMWEQDAAPFAGAADDFPAFNEEELAWLMELLPQSGSVGGTI

SEQ ID NO: 207 - protein, 1978 aa, Unknown
  ZNF638
MSRPRFNPRGDFPLQRPRAPNPSGMRPPGPFMRPGSMGLPRFYPAGRARGIPHRFAGHESYQNMGPQRMNVQVTQHRTDPRLTKEKLDFHEAQQKKGKPHGSRWDDEPHISASVAVKQSSVTQVTEQSPKVQSRYTKESASSILASFGLSNEDLEELSRYPDEQLTPENMPLILRDIRMRKMGRRLPNLPSQSRNKETLGSEAVSSNVIDYGHASKYGYTEDPLEVRIYDPEIPTDEVENEFQSQQNISASVPNPNVICNSMFPVEDVFRQMDFPGESSNNRSFFSVESGTKMSGLHISGGQSVLEPIKSVNQSINQTVSQTMSQSLIPPSMNQQPFSSELISSVSQQERIPHEPVINSSNVHVGSRGSKKNYQSQADIPIRSPFGIVKASWLPKFSHADAQKMKRLPTPSMMNDYYAASPRIFPHLCSLCNVECSHLKDWIQHQNTSTHIESCRQLRQQYPDWNPEILPSRRNEGNRKENETPRRRSHSPSPRRSRRSSSSHRFRRSRSPMHYMYRPRSRSPRICHRFISRYRSRSRSRSPYRIRNPFRGSPKCFRSVSPERMSRRSVRSSDRKKALEDVVQRSGHGTEFNKQKHLEAADKGHSPAQKPKTSSGTKPSVKPTSATKSDSNLGGHSIRCKSKNLEDDTLSECKQVSDKAVSLQRKLRKEQSLHYGSVLLITELPEDGCTEEDVRKLFQPFGKVNDVLIVPYRKEAYLEMEFKEAITAIMKYIETTPLTIKGKSVKICVPGKKKAQNKEVKKKTLESKKVSASTLKRDADASKAVEIVTSTSAAKTGQAKASVAKVNKSTGKSASSVKSVVTVAVKGNKASIKTAKSGGKKSLEAKKTGNVKNKDSNKPVTIPENSEIKTSIEVKATENCAKEAISDAALEATENEPLNKETEEMCVMLVSNLPNKGYSVEEVYDLAKPFGGLKDILILSSHKKAYIEINRKAAESMVKFYTCFPVLMDGNQLSISMAPENMNIKDEEAIFITLVKENDPEANIDTIYDRFVHLDNLPEDGLQCVLCVGLQFGKVDHHVFISNRNKAILQLDSPESAQSMYSFLKQNPQNIGDHMLTCSLSPKIDLPEVQIEHDPELEKESPGLKNSPIDESEVQTATDSPSVKPNELEEESTPSIQTETLVQQEEPCEEEAEKATCDSDFAVETLELETQGEEVKEEIPLVASASVSIEQFTENAEECALNQQMFNSDLEKKGAEIINPKTALLPSDSVFAEERNLKGILEESPSEAEDFISGITQTMVEAVAEVEKNETVSEILPSTCIVTLVPGIPTGDEKTVDKKNISEKKGNMDEKEEKEFNTKETRMDLQIGTEKAEKNEGRMDAEKVEKMAAMKEKPAENTLFKAYPNKGVGQANKPDETSKTSILAVSDVSSSKPSIKAVIVSSPKAKATVSKTENQKSFPKSVPRDQINAEKKLSAKEFGLLKPTSARSGLAESSSKFKPTQSSLTRGGSGRISALQGKLSKLDYRDITKQSQETEARPSIMKRDDSNNKTLAEQNTKNPKSTTGRSSKSKEEPLFPFNLDEFVTVDEVIEEVNPSQAKQNPLKGKRKETLKNVPFSELNLKKKKGKTSTPRGVEGELSFVTLDEIGEEEDAAAHLAQALVTVDEVIDEEELNMEEMVKNSNSLFTLDELIDQDDCISHSEPKDVTVLSVAEEQDLLKQERLVTVDEIGEVEELPLNESADITFATLNTKGNEGDTVRDSIGFISSQVPEDPSTLVTVDEIQDDSSDLHLVTLDEVTEEDEDSLADFNNLKEELNFVTVDEVGEEEDGDNDLKVELAQSKNDHPTDKKGNRKKRAVDTKKTKLESLSQVGPVNENVMEEDLKTMIERHLTAKTPTKRVRIGKTLPSEKAVVTEPAKGEEAFQMSEVDEESGLKDSEPERKRKKTEDSSSGKSVASDVPEELDFLVPKAGFFCPICSLFYSGEKAMTNHCKSTRHKQNTEKFMAKQRKEKEQNEAEERSSR

SEQ ID NO: 208 - protein, 1091 aa, Unknown
  PUMBY
MDKSKQMNINNLSNIPEVIDPGITIPIYEEEYENNGESNSQLQQQPQKLGSYRSRAGKFSNTLSNLLPSISAKLHHSKKNSHGKNGAEFSSSNNSSQSTVASKTPRASPSRSKMMESSIDGVTMDRPGSLTPPQDMEKLVHFPDSSNNFLIPAPRGSSDSFNLPHQISRTRNNTMSSQITSISSIAPKPRTSSGIWSSNASANDPMQQHLLQQLQPTTSNNTTNSNTLNDYSTKTAYFDNMVSTSGSQMADNKMNTNNLAIPNSVWSNTRQRSQSNASSIYTDAPLYEQPARASISSHYTIPTQESPLIADEIDPQSINWVTMDPTVPSINQISNLLPTNTISISNVFPLQHQQPQLNNAINLTSTSLATLCSKYGEVISARTLRNLNMALVEFSSVESAVKALDSLQGKEVSMIGAPSKISFAKILPMHQQPPQFLLNSQGLPLGLENNNLQPQPLLQEQLFNGAVTFQQQGNVSIPVFNQQSQQSQHQNHSSGSAGFSNVLHGYNNNNSMHGNNNNSANEKEQCPFPLPPPNVNEKEDLLREIIELFEANSDEYQINSLIKKSLNHKGTSDTQNFGPLPEPLSGREFDPPKLRELRKSIDSNAFSDLEIEQLAIAMLDELPELSSDYLGNTIVQKLFEHSSDIIKDIMLRKTSKYLTSMGVHKNGTWACQKMITMAHTPRQIMQVTQGVKDYCTPLINDQFGNYVIQCVLKFGFPWNQFIFESIIANFWVIVQNRYGARAVRACLEAHDIVTPEQSIVLSAMIVTYAEYLSTNSNGALLVTWFLDTSVLPNRHSILAPRLTKRIVELCGHRLASLTILKVLNYRGDDNARKIILDSLFGNVNAHDSSPPKELTKLLCETNYGPTFVHKVLAMPLLEDDLRAHIIKQVRKVLTDSTQIQPSRRLLEEVGLASPSSTHNKTKQQQQQHHNSSISHMFATPDTSGQHMRGLSVSSVKSGGSKHTTMNTTTTNGSSASTLSPGQPLNANSNSSMGYFSYPGVFPVSGFSGNASNGYAMNNDDLSSQFDMLNFNNGTRLSLPQLSLTNHNNTTMELVNNVGSSQPHTNNNNNNNNTNYNDDNTVFETLTLHSAN

SEQ ID NO: 209 - protein, 879 aa, Unknown
  PUF3
MEMNMDMDMDMELASIVSSLSALSHSNNNGGQAAAAGIVNGGAAGSQQIGGFRRSSFTTANEVDSEILLLHGSSESSPIFKKTALSVGTAPPFSTNSKKFFGNGGNYYQYRSTDTASLSSASYNNYHTHHTAANLGKNNKVNHLLGQYSASIAGPVYYNGNDNNNSGGEGFFEKFGKSLIDGTRELESQDRPDAVNTQSQFISKSVSNASLDTQNTFEQNVESDKNFNKLNRNTTNSGSLYHSSSNSGSSASLESENAHYPKRNIWNVANTPVFRPSNNPAAVGATNVALPNQQDGPANNNFPPYMNGFPPNQFHQGPHYQNFPNYLIGSPSNFISQMISVQIPANEDTEDSNGKKKKKANRPSSVSSPSSPPNNSPFPFAYPNPMMFMPPPPLSAPQQQQQQQQQQQQEDQQQQQQQENPYIYYPTPNPIPVKMPKDEKTFKKRNNKNHPANNSNNANKQANPYLENSIPTKNTSKKNASSKSNESTANNHKSHSHSHPHSQSLQQQQQTYHRSPLLEQLRNSSSDKNSNSNMSLKDIFGHSLEFCKDQHGSRFIQRELATSPASEKEVIFNEIRDDAIELSNDVFGNYVIQKFFEFGSKIQKNTLVDQFKGNMKQLSLQMYACRVIQKALEYIDSNQRIELVLELSDSVLQMIKDQNGNHVIQKAIETIPIEKLPFILSSLTGHIYHLSTHSYGCRVIQRLLEFGSSEDQESILNELKDFIPYLIQDQYGNYVIQYVLQQDQFTNKEMVDIKQEIIETVANNVVEYSKHKFASNVVEKSILYGSKNQKDLIISKILPRDKNHALNLEDDSPMILMIKDQFANYVIQKLVNVSEGEGKKLIVIAIRAYLDKLNKSNSLGNRHLASVEKLAALVENAEV

SEQ ID NO: 210 - protein, 888 aa, Unknown
  PUF4
MSTKGLKEEIDDVPSVDPVVSETVNSALEQLQLDDPEENATSNAFANKVSQDSQFANGPPSQMFPHPQMMGGMGFMPYSQMMQVPHNPCPFFPPPDFNDPTAPLSSSPLNAGGPPMLFKNDSLPFQMLSSGAAVATQGGQNLNPLINDNSMKVLPIASADPLWTHSNVPGSASVAIEETTATLQESLPSKGRESNNKASSFRRQTFHALSPTDLINAANNVTLSKDFQSDMQNFSKAKKPSVGANNTAKTRTQSISFDNTPSSTSFIPPTNSVSEKLSDFKIETSKEDLINKTAPAKKESPTTYGAAYPYGGPLLQPNPIMPGHPHNISSPIYGIRSPFPNSYEMGAQFQPFSPILNPTSHSLNANSPIPLTQSPIHLAPVLNPSSNSVAFSDMKNDGGKPTTDNDKAGPNVRMDLINPNLGPSMQPFHILPPQQNTPPPPWLYSTPPPFNAMVPPHLLAQNHMPLMNSANNKHHGRNNNSMSSHNDNDNIGNSNYNNKDTGRSNVGKMKNMKNSYHGYYNNNNNNNNNNNNNNNSNATNSNSAEKQRKIEESSRFADAVLDQYIGSIHSLCKDQHGCRFLQKQLDILGSKAADAIFEETKDYTVELMTDSFGNYLIQKLLEEVTTEQRIVLTKISSPHFVEISLNPHGTRALQKLIECIKTDEEAQIVVDSLRPYTVQLSKDLNGNHVIQKCLQRLKPENFQFIFDAISDSCIDIATHRHGCCVLQRCLDHGTTEQCDNLCDKLLALVDKLTLDPFGNYVVQYIITKEAEKNKYDYTHKIVHLLKPRAIELSIHKFGSNVIEKILKTAIVSEPMILEILNNGGETGIQSLLNDSYGNYVLQTALDISHKQNDYLYKRLSEIVAPLLVGPIRNTPHGKRIIGMLHLDS

SEQ ID NO: 211 - protein, 553 aa, Unknown
  PUF5
MSDSTGRINSKASDSSSISDHQTADLSIFNGSFDGGAFSSSNIPLFNFMGTGNQRFQYSPHPFAKSSDPCRLAALTPSTPKGPLNLTPADFGLADFSVGNESFADFTANNTSFVGNVQSNVRSTRLLPAWAVDNSGNIRDDLTLQDVVSNGSLIDFAMDRTGVKFLERHFPEDHDNEMHFVLFDKLTEQGAVFTSLCRSAAGNFIIQKFVEHATLDEQERLVRKMCDNGLIEMCLDKFACRVVQMSIQKFDVSIAMKLVEKISSLDFLPLCTDQCAIHVLQKVVKLLPISAWSFFVKFLCRDDNLMTVCQDKYGCRLVQQTIDKLSDNPKLHCFNTRLQLLHGLMTSVARNCFRLSSNEFANYVVQYVIKSSGVMEMYRDTIIEKCLLRNILSMSQDKYASHVVEGAFLFAPPLLLSEMMDEIFDGYVKDQETNRDALDILLFHQYGNYVVQQMISICISALLGKEERKMVASEMRLYAKWFDRIKNRVNRHSGRLERFSSGKKIIESLQKLNVPMTMTNEPMPYWAMPTPLMDISAHFMNKLNFQKNSVFDE

SEQ ID NO: 212 - protein, 485 aa, Unknown
  PUF6
MTPNRRSTDSYNMLGASFDFDPDFSLLSNKTHKNKNPKPPVKLLPYRHGSNTTSSDLDNYIFNSGSGSSDDETPPPAAPIFISLEEVLLNGLLIDFAIDPSGVKFLEANYPLDSEDQIRKAVFEKLTESTTLFVGLCHSRNGNFIVQKLVELATPAEQRELLRQMIDGGLLVMCKDKFACRVVQLALQKFDHSNVFQLIQELSTFDLAAMCTDQISIHVIQRVVKQLPVDMWTFFVHFLSSGDSLMAVCQDKYGCRLVQQVIDRLAENPKLPCFKFRIQLLHSLMTCIVRNCYRLSSNEFANYVIQYVIKSSGIMEMYRDTIIDKCLLRNLLSMSQDKYASHVIEGAFLFAPPALLHEMMEEIFSGYVKDVELNRDALDILLFHQYGNYVVQQMISICTAALIGKEERQLPPAILLLYSGWYEKMKQRVLQHASRLERFSSGKKIIDSVMRHGVPTAAAINAQAAPSLMELTAQFDAMFPSFLAR

SEQ ID NO: 213 - protein, 485 aa, Unknown
  PUF7
MTPNRRSTDSYNMLGASFDFDPDFSLLSNKTHKNKNPKPPVKLLPYRHGSNTTSSDSDSYIFNSGSGSSDAETPAPVAPIFISLEDVLLNGQLIDFAIDPSGVKFLEANYPLDSEDQIRKAVFEKFTESTTLFVGLCHSRNGNFIVQKLVELATPAEQRELLRQMIDGGLLAMCKDKFACRVVQLALQKFDHSNVFQLIQELSTFDLAAMCTDQISIHVIQRVVKQLPVDMWTFFVHFLSSGDSLMAVCQDKYGCRLVQQVIDRLAENPKLPCFKFRIQLLHSLMTCIVRNCYRLSSNEFANYVIQYVIKSSGIMEMYRDTIIDKCLLRNLLSMSQDKYASHVIEGAFLFAPPALLHEMMEEIFSGYVKDVESNRDALDILLFHQYGNYVVQQMISICTAALIGKEERELPPAILLLYSGWYEKMKQRVLQHASRLERFSSGKKIIDSVMRHGVPTAAAVNAQAAPSLMELTAQFDAMFPSFLAR

SEQ ID NO: 214 - protein, 535 aa, Unknown
  PUF8
MSRPISIGNTCTFDPSASPIESLGRSIGAQKIVDSVCGSPIRSYGRHISTNPKNERLPDTPEFQFATYMHQGGKVIGQNTLHMFGTPPSCYCAQENIPISSNVGHVLSTINNNYMNHQYNGSNMFSNQMTQMLQAQAYNDLQMHQAHSQSIRVPVQPSATGIFSNPYREPTTTDDLLTRYRANPAMMKNLKLSDIRGALLKFAKDQVGSRFIQQELASSKDRFEKDSIFDEVVSNADELVDDIFGNYVVQKFFEYGEERHWARLVDAIIDRVPEYAFQMYACRVLQKALEKINEPLQIKILSQIRHVIHRCMKDQNGNHVVQKAIEKVSPQYVQFIVDTLLESSNTIYEMSVDPYGCRVVQRCLEHCSPSQTKPVIGQIHKRFDEIANNQYGNYVVQHVIEHGSEEDRMVIVTRVSNNLFEFATHKYSSNVIEKCLEQGAVYHKSMIVGAACHHQEGSVPIVVQMMKDQYANYVVQKMFDQVTSEQRRELILTVRPHIPVLRQFPHGKHILAKLEKYFQKPAVMSYPYQDMQGSH

SEQ ID NO: 215 - protein, 703 aa, Unknown
  PUF9
MADPNWAYAPPTNYYADHSIAKPIMISGGHPSQDQGHSPKSESFGQSVTTAFNGMVDNLVGSPSSSVQQRNYFTTTPFPISRSPNDRNDDKIMGNGSYGVPIPIPQDGVPQGTPDFQMTPFLQQGGHLIGGSPNGPVQVSGNWYSGGAGIFSTMQQADPSNGMPGMAAEFVNNENGMPGPNGMHQQAMISGSPPFPYQNMMNLTTSFGAMGLGPQQIQQRDPQMFQQPILHEPIQGMAQNGFGQQVFFTQMQNQQHPQGQAQQQLQQLAQQHQQQQNSQQFFGQGPNGMGNGGVMNDWSQRSFGMPQQQAQQNGLPPNFSQNPPRRRGPEDPNGQTPKTLQDIKNNVIEFAKDQHGSRFIQQKLERASLRDKAAIFTPVLENAEELMTDVFGNYVIQKFFEFGNNEQRNQLVGTIRGNVMKLALQMYGCRVIQKALEYVEEKYQHEILGEMEGQVLKCVKDQNGNHVIQKVIERVEPERLQFIIDAFTKNNSDNVYTLSVHPYGCRVIQRVLEYCNEEQKQPVLDALQIHLKQLVLDQYGNYVIQHVIEHGSPSDKEQIVQDVISDDLLKFAQHKFASNVIEKCLTFGGHAERNLIIDKVCGDPNDPSPPLLQMMKDPFANYVVQKMLDVADPQHRKKITLTIKPHIATLRKYNFGKHILLKLEKYFAKQAPANSSNSSSNDQIYEHSPFDIPLGADFSNHPF

SEQ ID NO: 216 - DNA, 1098 bp, Homo sapiens
atggccgtcatggcgccccgaaccctcgtcctgctactctcgggggctctggccctgacccagacctgggcgggctctcactccatgaggtatttcttcacatccgtgtcccggcccggccgcggggagccccgcttcatcgcagtgggctacgtggacgacacgcagttcgtgcggttcgacagcgacgccgcgagccagaggatggagccgcgggcgccgtggatagagcaggagggtccggagtattgggacggggagacacggaaagtgaaggcccactcacagactcaccgagtggacctggggaccctgcgcggctactacaaccagagcgaggccggttctcacaccgtccagaggatgtgtggctgcgacgtggggtcggactggcgcttcctccgcgggtaccaccagtacgcctacgacggcaaggattacatcgccctgaaagaggacctgcgctcttggaccgcggcggacatggcagctcagaccaccaagcacaagtgggaggcggcccatgtggcggagcagttgagagcctacctggagggcacgtgcgtggagtggctccgcagatacctggagaacgggaaggagacgctgcagcgcacggacgcccccaaaacgcatatgactcaccacgctgtctctgaccatgaagccaccctgaggtgctgggccctgagcttctaccctgcggagatcacactgacctggcagcgggatggggaggaccagacccaggacacggagctcgtggagaccaggcctgcaggggatggaaccttccagaagtgggcggctgtggtggtgccttctggacaggagcagagataaacctgccatgtgcagcatgagggtttgcccaagcccctcaccctgagatgggagccgtcttcccagcccaccatccccatcgtgggcatcattgctggcctggttctctttggagctgtgatcactggagctgtggtcgctgctgtgatgtggaggaggaagagctcagatagaaaaggagggagctactctcaggctgcaagcagtgacagtgcccagggctctgatgtgtctctcacagcttgtaaagtgtga

SEQ ID NO: 217 - DNA, 3385 bp, Homo sapiens
tggtgtaggagaagagggatcaggacgaagtcccaggccccgggcggggctctcagggtctcaggctccgagggccgcgtctgcaatggggaggcgcagcgttggggattccccactcccacgagtttcacttcttctcccaacctatgtcgggtccttcttccaggatactcgtgacgcgtccccatttcccactcccattgggtgtcgggtgtctagagaagccaatcagcgtcgccgtggtcccagttctaaagtccccacgcacccacccggactcagaatctcctcagacgccgagatgcgggtcacggcaccccgaaccgtcctcctgctgctctcggcggccctggccctgaccgagacctgggccggtgagtgcgggtcggcagggaaatggcctctgtggggaggagcgaggggaccgcaggcgggggcgcaggacccggggagccgcgccgggaggagggtcgggcgggtctcagcccctcctcgcccccaggctcccactccatgaggtatttccacaccgccatgtcccggcccggccgcggggagccccgcttcatcaccgtgggctacgtggacgacacgctgttcgtgaggttcgacagcgacgccacgagtccgaggaaggagccgcgggcgccatggatagagcaggaggggccggagtattgggaccgggagacacagatctccaagaccaacacacagacttaccgagagagcctgcggaacctgcgcggctactacaaccagagcgaggccggtgagtgaccccggcccggggcgcaggtcacgactccccatcccccacgtacggcccgggtcgccccgagtctccgggtccgagatccgcccccctgaggccgcgggacccgcccagaccctcgaccggcgagagccccaggcgcgtttacccggtttcattttcagttgaggccaaaatccccgcgggttggtcggggcggggcggggcggggctcgggggacggggctgaccgcggggcctgggccagggtctcacacttggcagaggatgtatggctgcgacctggggcccgacgggcgcctcctccgcgggtataaccagttagcctacgacggcaaggattacatcgccctgaacgaggacctgagctcctggaccgcggcggacaccgcggctcagatcacccagcgcaagtgggaggcggcccgtgtggcggagcaggacagagcctacctggagggcctgtgcgtggagtcgctccgcagatacctggagaacgggaaggagacgctgcagcgcgcgggtaccaggggcagtggggagccttccccatctcctataggtcgccggggatggcctcccacgagaagaggaggaaaatgggatcagcgctagaatgtcgccctcccttgaatggagaatggcatgagttttcctgagtttcctctgagggccccctcttctctctaggacaataaggaatgacgtctctgaggaaatggaggggaagacagtccctagaatactgatcaggggtcccctttgacccctgcagcagccttgggaaccgtgactttcctctcaggccttgttctctgcctcacactcagtgtgtttggggctctgattccagcacttctgagtcactttacctccactcagatcgggagcagaagtccctgttccccgctcagagactcgaactttccaatgaataggagattatcccaggtgcctgcgtccaggctggtgtctgggttctgtgccccttccccaccccaggtgtcctgtccattctcaggctggtcacatgggtggtcctagggtgtcccatgagagatgcaaagcgcctgaattttctgactcttcccatcagaccccccaaagacacatgtgacccaccaccccatctctgaccatgaggccaccctgaggtgctgggccctgggcttctaccctgcggagatcacactgacctggcagcgggatggcgaggaccaaactcaggacaccgagcttgtggagaccagaccagcaggagatagaaccttccagaagtgggcagctgtggtggtgccttctggagaagagcagagatacacatgccatgtacagcatgaggggctgccgaagcccctcaccctgagatggggtaaggagggggatgaggggtcatatctgttctcagggaaagcaggagcccttctggagcccttcagcagggtcagggcccctcatcttcccctcctttcccagagccatcttcccagtccaccatccccatcgtgggcattgttgctggcctggctgtcctagcagttgtggtcatcggagctgtggtcgctactgtgatgtgtaggaggaagagctcaggtagggaaggggtgaggggtggggtctgggttttcttgtcccactgggggtttcaagccccaggtagaagtgttccctgcctcattactgggaagcagcatccacacaggggctaacgcagcctgggaccctgtgtgccagcacttactcttttgtgcagcacatgtgacaatgaaggacggatgtatcgccttgatggttgtggtgttggggtcctgattccagcattcatgagtcaggggaaggtccctgctaaggacagaccttaggagggcagttggtccaggacccacacttgctttcctcgtgtttcctgatcctgccttgggtctgtagtcatacttctggaaattccttttggttccaagacgaggaggttcctctaagatctcatggccctgcttcctcccagtcccctcacaggacattttcttcccacaggtggaaaaggagggagctactctcaggctgcgtgtaagtggtgggggtgggagtgtggaggagctcacccaccccataattcctcctgtcccacgtctcctgagggctctgaccaggtcctgtttttgttctactccagccagcgacagtgcccagggctctgatgtgtctctcacagcttgaaaaggtgagattcttggggtctagagtgggtggggtggcgggtctgggggtgggtggggcagtggggaaaggcctgggtaatggagattctttgattgggatgtttcgcgtgtgtggtgggctgttcagagtgtcatcacttaccatgactaaccagaatttgttcatgactgttgttttctgtagcctgagacagctgtcttgtgagggactgagatgcaggatttcttcacgcctcccctttgtgacttcaagagcctctggcatctctttctgcaaaggcacctgaatgtgtctgcgtccctgttagcataatgtgaggaggtggagagacagcccacccttgtgtccactgtgacccctgttcgcatgctgacctgtgtttcctcccca

SEQ ID NO: 218 - DNA, 1586 bp, Homo sapiens
tccgcagtcccggttctaaagtccccagtcacccacccggactcacattctccccagaggccgagatgcgggtcatggcgccccgagccctcctcctgctgctctcgggaggcctggccctgaccgagacctgggcctgctcccactccatgaggtatttcgacaccgccgtgtcccggcccggccgcggagagccccgcttcatctcagtgggctacgtggacgacacgcagttcgtgcggttcgacagcgacgccgcgagtccgagaggggagccgcgggcgccgtgggtggagcaggaggggccggagtattgggaccgggagacacagaagtacaagcgccaggcacaggctgaccgagtgagcctgcggaacctgcgcggctactacaaccagagcgaggacgggtctcacaccctccagaggatgtctggctgcgacctggggcccgacgggcgcctcctccgcgggtatgaccagtccgcctacgacggcaaggattacatcgccctgaacgaggacctgcgctcctggaccgccgcggacaccgcggctcagatcacccagcgcaagttggaggcggcccgtgcggcggagcagctgagagcctacctggagggcacgtgcgtggagtggctccgcagatacctggagaacgggaaggagacgctgcagcgcgcagaacccccaaagacacacgtgacccaccaccccctctctgaccatgaggccaccctgaggtgctgggccctgggcttctaccctgcggagatcacactgacctggcagcgggatggggaggaccagacccaggacaccgagcttgtggagaccaggccagcaggagatggaaccttccagaagtgggcagctgtggtggtgccttctggacaagagcagagatacacgtgccatatgcagcacgaggggctgcaagagcccctcaccctgagctgggagccatcttcccagcccaccatccccatcatgggcatcgttgctggcctggctgtcctggttgtcctagctgtccttggagctgtggtcaccgctatgatgtgtaggaggaagagctcaggtggaaaaggagggagctgctctcaggctgcgtgcagcaacagtgcccagggctctgatgagtctctcatcacttgtaaagcctgagacagctgcctgtgtgggactgagatgcaggatttcttcacacctctcctttgtgacttcaagagcctctggcatctctttctgcaaaggcacctgaatgtgtctgcgttcctgttagcataatgtgaggaggtggagagacagcccacccccgtgtccaccgtgacccctgtccccacactgacctgtgttccctccccgatcatctttcctgttccagagaggtggggctggatgtctccatctctgtctcaaattcatggtgcactgagctgcaacttcttacttccctaatgaagttaagaacctgaatataaatttgtgttctcaaatatttgctatgaagcgttgatggattaattaaataagtcaattcctagaagttgagagagcaaataaagacctgagaaccttccagaa

SEQ ID NO: 219 - DNA, 1586 bp, Homo sapiens
tccgcagtcccggttctaaagtccccagtcacccacccggactcacattctccccagaggccgagatgcgggtcatggcgccccgagccctcctcctgctgctctcgggaggcctggccctgaccgagacctgggcctgctcccactccatgaggtatttcgacaccgccgtgtcccggcccggccgcggagagccccgcttcatctcagtgggctacgtggacgacacgcagttcgtgcggttcgacagcgacgccgcgagtccgagaggggagccgcgggcgccgtgggtggagcaggaggggccggagtattgggaccgggagacacagaactacaagcgccaggcacaggctgaccgagtgagcctgcggaacctgcgcggctactacaaccagagcgaggacgggtctcacaccctccagaggatgtatggctgcgacctggggcccgacgggcgcctcctccgcgggtatgaccagtccgcctacgacggcaaggattacatcgccctgaacgaggacctgcgctcctggaccgccgcggacaccgcggctcagatcacccagcgcaagttggaggcggcccgtgcggcggagcagctgagagcctacctggagggcacgtgcgtggagtggctccgcagatacctggagaacgggaaggagacgctgcagcgcgcagaacccccaaagacacacgtgacccaccaccccctctctgaccatgaggccaccctgaggtgctgggccctgggcttctaccctgcggagatcacactgacctggcagcgggatggggaggaccagacccaggacaccgagcttgtggagaccaggccagcaggagatggaaccttccagaagtgggcagctgtggtggtgccttctggacaagagcagagatacacgtgccatatgcagcacgaggggctgcaagagcccctcaccctgagctgggagccatcttcccagcccaccatccccatcatgggcatcgttgctggcctggctgtcctggttgtcctagctgtccttggagctgtggtcaccgctatgatgtgtaggaggaagagctcaggtggaaaaggagggagctgctctcaggctgcgtgcagcaacagtgcccagggctctgatgagtctctcatcacttgtaaagcctgagacagctgcctgtgtgggactgagatgcaggatttcttcacacctctcctttgtgacttcaagagcctctggcatctctttctgcaaaggcgtctgaatgtgtctgcgttcctgttagcataatgtgaggaggtggagagacagcccacccccgtgtccaccgtgacccctgtccccacactgacctgtgttccctccccgatcatctttcctgttccagagaggtggggctggatgtctccatctctgtctcaaattcatggtgcactgagctgcaacttcttacttccctaatgaagttaagaacctgaatataaatttgtgttctcaaatatttgctatgaagcgttgatggattaattaaataagtcaattcctagaagttgagagagcaaataaagacctgagaaccttccagaa

SEQ ID NO: 220 - DNA, 1675 bp, Homo sapiens
attcctgaagctgacagcattcgggccgagatgtctcgctccgtggccttagctgtgctcgcgctactctctctttctggcctggaggctatccagcgtactccaaagattcaggtttactcacgtcatccagcagagaatggaaagtcaaatttcctgaattgctatgtgtctgggtttcatccatccgacattgaagttgacttactgaagaatggagagagaattgaaaaagtggagcattcagacttgtctttcagcaaggactggtctttctatctcttgtactacactgaattcacccccactgaaaaagatgagtatgcctgccgtgtgaaccatgtgactttgtcacagcccaagatagttaagtgggatcgagacatgtaagcagcatcatggaggtttgaagatgccgcatttggattggatgaattccaaattctgcttgcttgctttttaatattgatatgcttatacacttacactttatgcacaaaatgtagggttataataatgttaacatggacatgatcttctttataattctactttgagtgctgtctccatgtttgatgtatctgagcaggttgctccacaggtagctctaggagggctggcaacttagaggtggggagcagagaattctcttatccaacatcaacatcttggtcagatttgaactcttcaatctcttgcactcaaagcttgttaagatagttaagcgtgcataagttaacttccaatttacatactctgcttagaatttgggggaaaatttagaaatataattgacaggattattggaaatttgttataatgaatgaaacattttgtcatataagattcatatttacttcttatacatttgataaagtaaggcatggttgtggttaatctggtttatttttgttccacaagttaaataaatcataaaacttgatgtgttatctcttatatctcactcccactattacccctttattttcaaacagggaaacagtcttcaagttccacttggtaaaaaatgtgaaccccttgtatatagagtttggctcacagtgtaaagggcctcagtgattcacattttccagattaggaatctgatgctcaaagaagttaaatggcatagttggggtgacacagctgtctagtgggaggccagccttctatattttagccagcgttctttcctgcgggccaggtcatgaggagtatgcagactctaagagggagcaaaagtatctgaaggatttaatattttagcaaggaatagatatacaatcatcccttggtctccctgggggattggtttcaggaccccttcttggacaccaaatctatggatatttaagtcccttctataaaatggtatagtatttgcatataacctatccacatcctcctgtatactttaaatcatttctagattacttgtaatacctaatacaatgtaaatgctatgcaaatagttgttattgtttaaggaataatgacaagaaaaaaaagtctgtacatgctcagtaaagacacaaccatccctttttttccccagtgtttttgatccatggtttgctgaatccacagatgtggagcccctggatacggaaggcccgctgtactttgaatgacaaataacagatttaaaattttcaaggcatagttttatacctga

SEQ ID NO: 221 - DNA, 4900 bp, Homo sapiens
taaagtcatcaaaacaacgttatatcctgtgtgaaatgctgcagtcaggatgccttgtggtttgagtgccttgatcatgtgccctaaggggatggtggcggtggtggtggccgtggatgacggagactctcaggccttggcaggtgcgtctttcagttcccctcacacttcgggttcctcggggaggaggggctggaaccctagcccatcgtcaggacaaagatgctcaggctgctcttggctctcaacttattcccttcaattcaagtaacaggaaacaagattttggtgaagcagtcgcccatgcttgtagcgtacgacaatgcggtcaaccttagctgcaagtattcctacaatctcttctcaagggagttccgggcatcccttcacaaaggactggatagtgctgtggaagtctgtgttgtatatgggaattactcccagcagcttcaggtttactcaaaaacggggttcaactgtgatgggaaattgggcaatgaatcagtgacattctacctccagaatttgtatgttaaccaaacagatatttacttctgcaaaattgaagttatgtatcctcctccttacctagacaatgagaagagcaatggaaccattatccatgtgaaagggaaacacctttgtccaagtcccctatttcccggaccttctaagcccttttgggtgctggtggtggttggtggagtcctggcttgctatagcttgctagtaacagtggcctttattattttctgggtgaggagtaagaggagcaggctcctgcacagtgactacatgaacatgactccccgccgccccgggcccacccgcaagcattaccagccctatgccccaccacgcgacttcgcagcctatcgctcctgacacggacgcctatccagaagccagccggctggcagcccccatctgctcaatatcactgctctggataggaaatgaccgccatctccagccggccacctcaggcccctgttgggccaccaatgccaatttttctcgagtgactagaccaaatatcaagatcattttgagactctgaaatgaagtaaaagagatttcctgtgacaggccaagtcttacagtgccatggcccacattccaacttaccatgtacttagtgacttgactgagaagttagggtagaaaacaaaaagggagtggattctgggagcctcttccctttctcactcacctgcacatctcagtcaagcaaagtgtggtatccacagacattttagttgcagaagaaaggctaggaaatcattccttttggttaaatgggtgtttaatcttttggttagtgggttaaacggggtaagttagagtagggggagggataggaagacatatttaaaaaccattaaaacactgtctcccactcatgaaatgagccacgtagttcctatttaatgctgttttcctttagtttagaaatacatagacattgtcttttatgaattctgatcatatttagtcattttgaccaaatgagggatttggtcaaatgagggattccctcaaagcaatatcaggtaaaccaagttgctttcctcactccctgtcatgagacttcagtgttaatgttcacaatatactttcgaaagaataaaatagttctcctacatgaagaaagaatatgtcaggaaataaggtcactttatgtcaaaattatttgagtactatgggacctggcgcagtggctcatgcttgtaatcccagcactttgggaggccgaggtgggcagatcacttgagatcaggaccagcctggtcaagatggtgaaactccgtctgtactaaaaatacaaaatttagcttggcctggtggcaggcacctgtaatcccagctgcccaagaggctgaggcatgagaatcgcttgaacctggcaggcggaggttgcagtgagccgagatagtgccacagctctccagcctgggcgacagagtgagactccatctcaaacaacaacaacaacaacaacaacaacaacaaaccacaaaattatttgagtactgtgaaggattatttgtctaacagttcattccaatcagaccaggtaggagctttcctgtttcatatgtttcagggttgcacagttggtctctttaatgtcggtgtggagatccaaagtgggttgtggaaagagcgtccataggagaagtgagaatactgtgaaaaagggatgttagcattcattagagtatgaggatgagtcccaagaaggttctttggaaggaggacgaatagaatggagtaatgaaattcttgccatgtgctgaggagatagccagcattaggtgacaatcttccagaagtggtcaggcagaaggtgccctggtgagagctcctttacagggactttatgtggtttagggctcagagctccaaaactctgggctcagctgctcctgtaccttggaggtccattcacatgggaaagtattttggaatgtgtcttttgaagagagcatcagagttcttaagggactgggtaaggcctgaccctgaaatgaccatggatatttttctacctacagtttgagtcaactagaatatgcctggggaccttgaagaatggcccttcagtggccctcaccatttgttcatgcttcagttaattcaggtgttgaaggagcttaggttttagaggcacgtagacttggttcaagtctcgttagtagttgaatagcctcaggcaagtcactgcccacctaagatgatggttcttcaactataaaatggagataatggttacaaatgtctcttcctatagtataatctccataagggcatggcccaagtctgtctttgactctgcctatccctgacatttagtagcatgcccgacatacaatgttagctattggtattattgccatatagataaattatgtataaaaattaaactgggcaatagcctaagaaggggggaatattgtaacacaaatttaaacccactacgcagggatgaggtgctataatatgaggaccttttaacttccatcattttcctgtttcttgaaatagtttatcttgtaatgaaatataaggcacctcccacttttatgtatagaaagaggtcttttaatttttttttaatgtgagaaggaagggaggagtaggaatcttgagattccagatcgaaaatactgtactttggttgatttttaagtgggcttccattccatggatttaatcagtcccaagaagatcaaactcagcagtacttgggtgctgaagaactgttggatttaccctggcacgtgtgccacttgccagcttcttgggcacacagagttcttcaatccaagttatcagattgtatttgaaaatgacagagctggagagttttttgaaatggcagtggcaaataaataaatacttttttttaaatggaaagacttgatctatggtaataaatgattttgttttctgactggaaaaataggcctactaaagatgaatcacacttgagatgtttcttactcactctgcacagaaacaaagaagaaatgttatacagggaagtccgttttcactattagtatgaaccaagaaatggttcaaaaacagtggtaggagcaatgctttcatagtttcagatatggtagttatgaagaaaacaatgtcatttgctgctattattgtaagagtcttataattaatggtactcctataatttttgattgtgagctcacctatttgggttaagcatgccaatttaaagagaccaagtgtatgtacattatgttctacatattcagtgataaaattactaaactactatatgtctgctttaaatttgtactttaatattgtcttttggtattaagaaagatatgctttcagaatagatatgcttcgctttggcaaggaatttggatagaacttgctatttaaaagaggtgtggggtaaatccttgtataaatctccagtttagccttttttgaaaaagctagactttcaaatactaatttcacttcaagcagggtacgtttctggtttgtttgcttgacttcagtcacaatttcttatcagaccaatggctgacctctttgagatgtcaggctaggcttacctatgtgttctgtgtcatgtgaatgctgagaagtttgacagagatccaacttcagccttgaccccatcagtccctcgggttaactaactgagccaccggtcctcatggctattttaatgagggtattgatggttaaatgcatgtctgatcccttatcccagccatttgcactgccagctgggaactataccagacctggatactgatcccaaagtgttaaattcaactacatgctggagattagagatggtgccaataaaggacccagaaccaggatcttgattgctatagacttattaataatccaggtcaaagagagtgacacacactctctcaagacctggggtgagggagtctgtgttatctgcaaggccatttgaggctcagaaagtctctctttcctatagatatatgcatactttctgacatataggaatgtatcaggaatactcaaccatcacaggcatgttcctacctcagggcctttacatgtcctgtttactctgtctagaatgtccttctgtagatgacctggcttgcctcgtcacccttcaggtccttgctcaagtgtcatcttctcccctagttaaactaccccacaccctgtctgctttccttgcttatttttctccatagcattttaccatctcttacattagacatttttcttatttatttgtagtttataagcttcatgaggcaagtaactttgctttgtttcttgctgtatctccagtgcccagagcagtgcctggtatataataaatatttattgactgagtgaaaaaaaaaaaaaaaaa

SEQ ID NO: 222 - DNA, 4609 bp, Homo sapiens
taaagtcatcaaaacaacgttatatcctgtgtgaaatgctgcagtcaggatgccttgtggtttgagtgccttgatcatgtgccctaaggggatggtggcggtggtggtggccgtggatgacggagactctcaggccttggcaggtgcgtctttcagttcccctcacacttcgggttcctcggggaggaggggctggaaccctagcccatcgtcaggacaaagatgctcaggctgctcttggctctcaacttattcccttcaattcaagtaacaggaaacaagattttggtgaagcagtcgcccatgcttgtagcgtacgacaatgcggtcaaccttagctggaaacacctttgtccaagtcccctatttcccggaccttctaagcccttttgggtgctggtggtggttggtggagtcctggcttgctatagcttgctagtaacagtggcctttattattttctgggtgaggagtaagaggagcaggctcctgcacagtgactacatgaacatgactccccgccgccccgggcccacccgcaagcattaccagccctatgccccaccacgcgacttcgcagcctatcgctcctgacacggacgcctatccagaagccagccggctggcagcccccatctgctcaatatcactgctctggataggaaatgaccgccatctccagccggccacctcaggcccctgttgggccaccaatgccaatttttctcgagtgactagaccaaatatcaagatcattttgagactctgaaatgaagtaaaagagatttcctgtgacaggccaagtcttacagtgccatggcccacattccaacttaccatgtacttagtgacttgactgagaagttagggtagaaaacaaaaagggagtggattctgggagcctcttccctttctcactcacctgcacatctcagtcaagcaaagtgtggtatccacagacattttagttgcagaagaaaggctaggaaatcattccttttggttaaatgggtgtttaatcttttggttagtgggttaaacggggtaagttagagtagggggagggataggaagacatatttaaaaaccattaaaacactgtctcccactcatgaaatgagccacgtagttcctatttaatgctgttttcctttagtttagaaatacatagacattgtcttttatgaattctgatcatatttagtcattttgaccaaatgagggatttggtcaaatgagggattccctcaaagcaatatcaggtaaaccaagttgctttcctcactccctgtcatgagacttcagtgttaatgttcacaatatactttcgaaagaataaaatagttctcctacatgaagaaagaatatgtcaggaaataaggtcactttatgtcaaaattatttgagtactatgggacctggcgcagtggctcatgcttgtaatcccagcactttgggaggccgaggtgggcagatcacttgagatcaggaccagcctggtcaagatggtgaaactccgtctgtactaaaaatacaaaatttagcttggcctggtggcaggcacctgtaatcccagctgcccaagaggctgaggcatgagaatcgcttgaacctggcaggcggaggttgcagtgagccgagatagtgccacagctctccagcctgggcgacagagtgagactccatctcaaacaacaacaacaacaacaacaacaacaacaaaccacaaaattatttgagtactgtgaaggattatttgtctaacagttcattccaatcagaccaggtaggagctttcctgtttcatatgtttcagggttgcacagttggtctctttaatgtcggtgtggagatccaaagtgggttgtggaaagagcgtccataggagaagtgagaatactgtgaaaaagggatgttagcattcattagagtatgaggatgagtcccaagaaggttctttggaaggaggacgaatagaatggagtaatgaaattcttgccatgtgctgaggagatagccagcattaggtgacaatcttccagaagtggtcaggcagaaggtgccctggtgagagctcctttacagggactttatgtggtttagggctcagagctccaaaactctgggctcagctgctcctgtaccttggaggtccattcacatgggaaagtattttggaatgtgtcttttgaagagagcatcagagttcttaagggactgggtaaggcctgaccctgaaatgaccatggatatttttctacctacagtttgagtcaactagaatatgcctggggaccttgaagaatggcccttcagtggccctcaccatttgttcatgcttcagttaattcaggtgttgaaggagcttaggttttagaggcacgtagacttggttcaagtctcgttagtagttgaatagcctcaggcaagtcactgcccacctaagatgatggttcttcaactataaaatggagataatggttacaaatgtctcttcctatagtataatctccataagggcatggcccaagtctgtctttgactctgcctatccctgacatttagtagcatgcccgacatacaatgttagctattggtattattgccatatagataaattatgtataaaaattaaactgggcaatagcctaagaaggggggaatattgtaacacaaatttaaacccactacgcagggatgaggtgctataatatgaggaccttttaacttccatcattttcctgtttcttgaaatagtttatcttgtaatgaaatataaggcacctcccacttttatgtatagaaagaggtcttttaatttttttttaatgtgagaaggaagggaggagtaggaatcttgagattccagatcgaaaatactgtactttggttgatttttaagtgggcttccattccatggatttaatcagtcccaagaagatcaaactcagcagtacttgggtgctgaagaactgttggatttaccctggcacgtgtgccacttgccagcttcttgggcacacagagttcttcaatccaagttatcagattgtatttgaaaatgacagagctggagagttttttgaaatggcagtggcaaataaataaatacttttttttaaatggaaagacttgatctatggtaataaatgattttgttttctgactggaaaaataggcctactaaagatgaatcacacttgagatgtttcttactcactctgcacagaaacaaagaagaaatgttatacagggaagtccgttttcactattagtatgaaccaagaaatggttcaaaaacagtggtaggagcaatgctttcatagtttcagatatggtagttatgaagaaaacaatgtcatttgctgctattattgtaagagtcttataattaatggtactcctataatttttgattgtgagctcacctatttgggttaagcatgccaatttaaagagaccaagtgtatgtacattatgttctacatattcagtgataaaattactaaactactatatgtctgctttaaatttgtactttaatattgtcttttggtattaagaaagatatgctttcagaatagatatgcttcgctttggcaaggaatttggatagaacttgctatttaaaagaggtgtggggtaaatccttgtataaatctccagtttagccttttttgaaaaagctagactttcaaatactaatttcacttcaagcagggtacgtttctggtttgtttgcttgacttcagtcacaatttcttatcagaccaatggctgacctctttgagatgtcaggctaggcttacctatgtgttctgtgtcatgtgaatgctgagaagtttgacagagatccaacttcagccttgaccccatcagtccctcgggttaactaactgagccaccggtcctcatggctattttaatgagggtattgatggttaaatgcatgtctgatcccttatcccagccatttgcactgccagctgggaactataccagacctggatactgatcccaaagtgttaaattcaactacatgctggagattagagatggtgccaataaaggacccagaaccaggatcttgattgctatagacttattaataatccaggtcaaagagagtgacacacactctctcaagacctggggtgagggagtctgtgttatctgcaaggccatttgaggctcagaaagtctctctttcctatagatatatgcatactttctgacatataggaatgtatcaggaatactcaaccatcacaggcatgttcctacctcagggcctttacatgtcctgtttactctgtctagaatgtccttctgtagatgacctggcttgcctcgtcacccttcaggtccttgctcaagtgtcatcttctcccctagttaaactaccccacaccctgtctgctttccttgcttatttttctccatagcattttaccatctcttacattagacatttttcttatttatttgtagtttataagcttcatgaggcaagtaactttgctttgtttcttgctgtatctccagtgcccagagcagtgcctggtatataataaatatttattgactgagtgaaaaaaaaaaaaaaaaa

SEQ ID NO: 223 - DNA, 4543 bp, Homo sapiens
taaagtcatcaaaacaacgttatatcctgtgtgaaatgctgcagtcaggatgccttgtggtttgagtgccttgatcatgtgccctaaggggatggtggcggtggtggtggccgtggatgacggagactctcaggccttggcaggtgcgtctttcagttcccctcacacttcgggttcctcggggaggaggggctggaaccctagcccatcgtcaggacaaagatgctcaggctgctcttggctctcaacttattcccttcaattcaagtaacagggaaacacctttgtccaagtcccctatttcccggaccttctaagcccttttgggtgctggtggtggttggtggagtcctggcttgctatagcttgctagtaacagtggcctttattattttctgggtgaggagtaagaggagcaggctcctgcacagtgactacatgaacatgactccccgccgccccgggcccacccgcaagcattaccagccctatgccccaccacgcgacttcgcagcctatcgctcctgacacggacgcctatccagaagccagccggctggcagcccccatctgctcaatatcactgctctggataggaaatgaccgccatctccagccggccacctcaggcccctgttgggccaccaatgccaatttttctcgagtgactagaccaaatatcaagatcattttgagactctgaaatgaagtaaaagagatttcctgtgacaggccaagtcttacagtgccatggcccacattccaacttaccatgtacttagtgacttgactgagaagttagggtagaaaacaaaaagggagtggattctgggagcctcttccctttctcactcacctgcacatctcagtcaagcaaagtgtggtatccacagacattttagttgcagaagaaaggctaggaaatcattccttttggttaaatgggtgtttaatcttttggttagtgggttaaacggggtaagttagagtagggggagggataggaagacatatttaaaaaccattaaaacactgtctcccactcatgaaatgagccacgtagttcctatttaatgctgttttcctttagtttagaaatacatagacattgtcttttatgaattctgatcatatttagtcattttgaccaaatgagggatttggtcaaatgagggattccctcaaagcaatatcaggtaaaccaagttgctttcctcactccctgtcatgagacttcagtgttaatgttcacaatatactttcgaaagaataaaatagttctcctacatgaagaaagaatatgtcaggaaataaggtcactttatgtcaaaattatttgagtactatgggacctggcgcagtggctcatgcttgtaatcccagcactttgggaggccgaggtgggcagatcacttgagatcaggaccagcctggtcaagatggtgaaactccgtctgtactaaaaatacaaaatttagcttggcctggtggcaggcacctgtaatcccagctgcccaagaggctgaggcatgagaatcgcttgaacctggcaggcggaggttgcagtgagccgagatagtgccacagctctccagcctgggcgacagagtgagactccatctcaaacaacaacaacaacaacaacaacaacaacaaaccacaaaattatttgagtactgtgaaggattatttgtctaacagttcattccaatcagaccaggtaggagctttcctgtttcatatgtttcagggttgcacagttggtctctttaatgtcggtgtggagatccaaagtgggttgtggaaagagcgtccataggagaagtgagaatactgtgaaaaagggatgttagcattcattagagtatgaggatgagtcccaagaaggttctttggaaggaggacgaatagaatggagtaatgaaattcttgccatgtgctgaggagatagccagcattaggtgacaatcttccagaagtggtcaggcagaaggtgccctggtgagagctcctttacagggactttatgtggtttagggctcagagctccaaaactctgggctcagctgctcctgtaccttggaggtccattcacatgggaaagtattttggaatgtgtcttttgaagagagcatcagagttcttaagggactgggtaaggcctgaccctgaaatgaccatggatatttttctacctacagtttgagtcaactagaatatgcctggggaccttgaagaatggcccttcagtggccctcaccatttgttcatgcttcagttaattcaggtgttgaaggagcttaggttttagaggcacgtagacttggttcaagtctcgttagtagttgaatagcctcaggcaagtcactgcccacctaagatgatggttcttcaactataaaatggagataatggttacaaatgtctcttcctatagtataatctccataagggcatggcccaagtctgtctttgactctgcctatccctgacatttagtagcatgcccgacatacaatgttagctattggtattattgccatatagataaattatgtataaaaattaaactgggcaatagcctaagaaggggggaatattgtaacacaaatttaaacccactacgcagggatgaggtgctataatatgaggaccttttaacttccatcattttcctgtttcttgaaatagtttatcttgtaatgaaatataaggcacctcccacttttatgtatagaaagaggtcttttaatttttttttaatgtgagaaggaagggaggagtaggaatcttgagattccagatcgaaaatactgtactttggttgatttttaagtgggcttccattccatggatttaatcagtcccaagaagatcaaactcagcagtacttgggtgctgaagaactgttggatttaccctggcacgtgtgccacttgccagcttcttgggcacacagagttcttcaatccaagttatcagattgtatttgaaaatgacagagctggagagttttttgaaatggcagtggcaaataaataaatacttttttttaaatggaaagacttgatctatggtaataaatgattttgttttctgactggaaaaataggcctactaaagatgaatcacacttgagatgtttcttactcactctgcacagaaacaaagaagaaatgttatacagggaagtccgttttcactattagtatgaaccaagaaatggttcaaaaacagtggtaggagcaatgctttcatagtttcagatatggtagttatgaagaaaacaatgtcatttgctgctattattgtaagagtcttataattaatggtactcctataatttttgattgtgagctcacctatttgggttaagcatgccaatttaaagagaccaagtgtatgtacattatgttctacatattcagtgataaaattactaaactactatatgtctgctttaaatttgtactttaatattgtcttttggtattaagaaagatatgctttcagaatagatatgcttcgctttggcaaggaatttggatagaacttgctatttaaaagaggtgtggggtaaatccttgtataaatctccagtttagccttttttgaaaaagctagactttcaaatactaatttcacttcaagcagggtacgtttctggtttgtttgcttgacttcagtcacaatttcttatcagaccaatggctgacctctttgagatgtcaggctaggcttacctatgtgttctgtgtcatgtgaatgctgagaagtttgacagagatccaacttcagccttgaccccatcagtccctcgggttaactaactgagccaccggtcctcatggctattttaatgagggtattgatggttaaatgcatgtctgatcccttatcccagccatttgcactgccagctgggaactataccagacctggatactgatcccaaagtgttaaattcaactacatgctggagattagagatggtgccaataaaggacccagaaccaggatcttgattgctatagacttattaataatccaggtcaaagagagtgacacacactctctcaagacctggggtgagggagtctgtgttatctgcaaggccatttgaggctcagaaagtctctctttcctatagatatatgcatactttctgacatataggaatgtatcaggaatactcaaccatcacaggcatgttcctacctcagggcctttacatgtcctgtttactctgtctagaatgtccttctgtagatgacctggcttgcctcgtcacccttcaggtccttgctcaagtgtcatcttctcccctagttaaactaccccacaccctgtctgctttccttgcttatttttctccatagcattttaccatctcttacattagacatttttcttatttatttgtagtttataagcttcatgaggcaagtaactttgctttgtttcttgctgtatctccagtgcccagagcagtgcctggtatataataaatatttattgactgagtgaaaaaaaaaaaaaaaaa

SEQ ID NO: 224 - DNA, 2757 bp, Homo sapiens
gacaagtactgagtgaactcaaaccctctgtaaagtaacagaagttagaaggggaaatgtcgcctctctgaagattacccaaagaaaaagtgatttgtcattgctttatagactgtaagaagagaacatctcagaagtggagtcttaccctgaaatcaaaggatttaaagaaaaagtggaatttttcttcagcaagctgtgaaactaaatccacaacctttggagacccaggaacaccctccaatctctgtgtgttttgtaaacatcactggagggtcttctacgtgagcaattggattgtcatcagccctgcctgttttgcacctgggaagtgccctggtcttacttgggtccaaattgttggctttcacttttgaccctaagcatctgaagccatgggccacacacggaggcagggaacatcaccatccaagtgtccatacctcaatttctttcagctcttggtgctggctggtctttctcacttctgttcaggtgttatccacgtgaccaaggaagtgaaagaagtggcaacgctgtcctgtggtcacaatgtttctgttgaagagctggcacaaactcgcatctactggcaaaaggagaagaaaatggtgctgactatgatgtctggggacatgaatatatggcccgagtacaagaaccggaccatctttgatatcactaataacctctccattgtgatcctggctctgcgcccatctgacgagggcacatacgagtgtgttgttctgaagtatgaaaaagacgctttcaagcgggaacacctggctgaagtgacgttatcagtcaaagctgacttccctacacctagtatatctgactttgaaattccaacttctaatattagaaggataatttgctcaacctctggaggttttccagagcctcacctctcctggttggaaaatggagaagaattaaatgccatcaacacaacagtttcccaagatcctgaaactgagctctatgctgttagcagcaaactggatttcaatatgacaaccaaccacagcttcatgtgtctcatcaagtatggacatttaagagtgaatcagaccttcaactggaatacaaccaagcaagagcattttcctgataacctgctcccatcctgggccattaccttaatctcagtaaatggaatttttgtgatatgctgcctgacctactgctttgccccaagatgcagagagagaaggaggaatgagagattgagaagggaaagtgtacgccctgtataacagtgtccgcagaagcaaggggctgaaaagatctgaaggtcccacctccatttgcaattgacctcttctgggaacttcctcagatggacaagattaccccaccttgccctttacgtatctgctcttaggtgcttcttcacttcagttgctttgcaggaagtgtctagaggaatatggtgggcacagaagtagctctggtgaccttgatcaaggtgttttgaaatgcagaattcttgagttctggaagggactttagagaataccagtgttattaatgacaaaggcactgaggcccagggaggtgacccgaattataaaggccagcgccagaacccagatttcctaactctggtgctctttccctttatcagtttgactgtggcctgttaactggtatatacatatatatgtcaggcaaagtgctgctggaagtagaatttgtccaataacaggtcaacttcagagactatctgatttcctaatgtcagagtagaagattttatgctgctgtttacaaaagcccaatgtaatgcataggaagtatggcatgaacatctttaggagactaatggaaatattattggtgtttacccagtattccatttttttcattgtgttctctattgctgctctctcactcccccatgaggtacagcagaaaggagaactatccaaaactaatttcctctgacatgtaagacgaatgatttaggtacgtcaaagcagtagtcaaggaggaaagggatagtccaaagacttaactggttcatattggactgataatctctttaaatggctttatgctagtttgacctcatttgtaaaatatttatgagaaagttctcatttaaaatgagatcgttgtttacagtgtatgtactaagcagtaagctatcttcaaatgtctaaggtagtaactttccatagggcctccttagatccctaagatggctttttctccttggtatttctgggtctttctgacatcagcagagaactggaaagacatagccaactgctgttcatgttactcatgactcctttctctaaaactgccttccacaattcactagaccagaagtggacgcaacttaagctgggataatcacattatcatctgaaaatctggagttgaacagcaaaagaagacaacatttctcaaatgcacatctcatggcagctaagccacatggctgggatttaaagcctttagagccagcccatggctttagctacctcactatgctgcttcacaaaccttgctcctgtgtaaaactatattctcagtgtagggcagagaggtctaacaccaacataaggtactagcagtgtttcccgtattgacaggaatacttaactcaataattcttttcttttccatttagtaacagttgtgatgactatgtttctattctaagtaattcctgtattctacagcagatactttgtcagcaatactaagggaagaaacaaagttgaaccgtttctttaataa

SEQ ID NO: 225 - protein, 128 aa, Artificial Sequence; identical to SEQ ID NO: 121
  Rnase1 (R39D, N67D, N88A, G89D, R91D, H119N, K41R, D121E)

SEQ ID NO: 226 - DNA, 2735 bp, Homo sapiens
agtcattgccgaggaaggcttgcacagggtgaaagctttgcttctctgctgctgtaacagggactagcacagacacacggatgagtggggtcatttccagatattaggtcacagcagaagcagccaaaatggatccccagtgcactatgggactgagtaacattctctttgtgatggccttcctgctctctggtgctgctcctctgaagattcaagcttatttcaatgagactgcagacctgccatgccaatttgcaaactctcaaaaccaaagcctgagtgagctagtagtattttggcaggaccaggaaaacttggttctgaatgaggtatacttaggcaaagagaaatttgacagtgttcattccaagtatatgggccgcacaagttttgattcggacagttggaccctgagacttcacaatcttcagatcaaggacaagggcttgtatcaatgtatcatccatcacaaaaagcccacaggaatgattcgcatccaccagatgaattctgaactgtcagtgcttgctaacttcagtcaacctgaaatagtaccaatttctaatataacagaaaatgtgtacataaatttgacctgctcatctatacacggttacccagaacctaagaagatgagtgttttgctaagaaccaagaattcaactatcgagtatgatggtattatgcagaaatctcaagataatgtcacagaactgtacgacgtttccatcagcttgtctgtttcattccctgatgttacgagcaatatgaccatcttctgtattctggaaactgacaagacgcggcttttatcttcacctttctctatagagcttgaggaccctcagcctcccccagaccacattccttggattacagctgtacttccaacagttattatatgtgtgatggttttctgtctaattctatggaaatggaagaagaagaagcggcctcgcaactcttataaatgtggaaccaacacaatggagagggaagagagtgaacagaccaagaaaagagaaaaaatccatatacctgaaagatctgatgaagcccagcgtgtttttaaaagttcgaagacatcttcatgcgacaaaagtgatacatgtttttaattaaagagtaaagcccatacaagtattcattttttctaccctttcctttgtaagttcctgggcaacctttttgatttcttccagaaggcaaaaagacattaccatgagtaataagggggctccaggactccctctaagtggaatagcctccctgtaactccagctctgctccgtatgccaagaggagactttaattctcttactgcttcttttcacttcagagcacacttatgggccaagcccagcttaatggctcatgacctggaaataaaatttaggaccaatacctcctccagatcagattcttctcttaatttcatagattgtgttttttttttaaatagacctctcaatttctggaaaactgccttttatctgcccagaattctaagctggtgccccactgaattttgtgtacctgtgactaaacaactacctcctcagtctgggtgggacttatgtatttatgaccttatagtgttaatatcttgaaacatagagatctatgtactgtaatagtgtgattactatgctctagagaaaagtctacccctgctaaggagttctcatccctctgtcagggtcagtaaggaaaacggtggcctagggtacaggcaacaatgagcagaccaacctaaatttggggaaattaggagaggcagagatagaacctggagccacttctatctgggctgttgctaatattgaggaggcttgccccacccaacaagccatagtggagagaactgaataaacaggaaaatgccagagcttgtgaaccctgtttctcttgaagaactgactagtgagatggcctggggaagctgtgaaagaaccaaaagagatcacaatactcaaaagagagagagagagaaaaaagagagatcttgatccacagaaatacatgaaatgtctggtctgtccaccccatcaacaagtcttgaaacaagcaacagatggatagtctgtccaaatggacataagacagacagcagtttccctggtggtcagggaggggttttggtgatacccaagttattgggatgtcatcttcctggaagcagagctggggagggagagccatcaccttgataatgggatgaatggaaggaggcttaggactttccactcctggctgagagaggaagagctgcaacggaattaggaagaccaagacacagatcacccggggcttacttagcctacagatgtcctacgggaacgtgggctggcccagcatagggctagcaaatttgagttggatgattgtttttgctcaaggcaaccagaggaaacttgcatacagagacagatatactgggagaaatgactttgaaaacctggctctaaggtgggatcactaagggatggggcagtctctgcccaaacataaagagaactctggggagcctgagccacaaaaatgttcctttattttatgtaaaccctcaagggttatagactgccatgctagacaagcttgtccatgtaatattcccatgtttttaccctgcccctgccttgattagactcctagcacctggctagtttctaacatgttttgtgcagcacagtttttaataaatgcttgttacattcatttaaaaaaaaaaaaaa

SEQ ID NO: 227 - DNA, 2790 bp, Homo sapiens
ccctttctgtatttgagttctaccgtcagtcctggcattatttctctctctacaaggagccttaggaggtacggggagctcgcaaatactccttttggtttattcttaccaccttgcttctgtgttccttgggaatgctgctgtgcttatgcatctggtctctttttggagctacagtggacaggcatttgtgacagcactatgggactgagtaacattctctttgtgatggccttcctgctctctggtgctgctcctctgaagattcaagcttatttcaatgagactgcagacctgccatgccaatttgcaaactctcaaaaccaaagcctgagtgagctagtagtattttggcaggaccaggaaaacttggttctgaatgaggtatacttaggcaaagagaaatttgacagtgttcattccaagtatatgggccgcacaagttttgattcggacagttggaccctgagacttcacaatcttcagatcaaggacaagggcttgtatcaatgtatcatccatcacaaaaagcccacaggaatgattcgcatccaccagatgaattctgaactgtcagtgcttgctaacttcagtcaacctgaaatagtaccaatttctaatataacagaaaatgtgtacataaatttgacctgctcatctatacacggttacccagaacctaagaagatgagtgttttgctaagaaccaagaattcaactatcgagtatgatggtattatgcagaaatctcaagataatgtcacagaactgtacgacgtttccatcagcttgtctgtttcattccctgatgttacgagcaatatgaccatcttctgtattctggaaactgacaagacgcggcttttatcttcacctttctctatagagcttgaggaccctcagcctcccccagaccacattccttggattacagctgtacttccaacagttattatatgtgtgatggttttctgtctaattctatggaaatggaagaagaagaagcggcctcgcaactcttataaatgtggaaccaacacaatggagagggaagagagtgaacagaccaagaaaagagaaaaaatccatatacctgaaagatctgatgaagcccagcgtgtttttaaaagttcgaagacatcttcatgcgacaaaagtgatacatgtttttaattaaagagtaaagcccatacaagtattcattttttctaccctttcctttgtaagttcctgggcaacctttttgatttcttccagaaggcaaaaagacattaccatgagtaataagggggctccaggactccctctaagtggaatagcctccctgtaactccagctctgctccgtatgccaagaggagactttaattctcttactgcttcttttcacttcagagcacacttatgggccaagcccagcttaatggctcatgacctggaaataaaatttaggaccaatacctcctccagatcagattcttctcttaatttcatagattgtgttttttttttaaatagacctctcaatttctggaaaactgccttttatctgcccagaattctaagctggtgccccactgaattttgtgtacctgtgactaaacaactacctcctcagtctgggtgggacttatgtatttatgaccttatagtgttaatatcttgaaacatagagatctatgtactgtaatagtgtgattactatgctctagagaaaagtctacccctgctaaggagttctcatccctctgtcagggtcagtaaggaaaacggtggcctagggtacaggcaacaatgagcagaccaacctaaatttggggaaattaggagaggcagagatagaacctggagccacttctatctgggctgttgctaatattgaggaggcttgccccacccaacaagccatagtggagagaactgaataaacaggaaaatgccagagcttgtgaaccctgtttctcttgaagaactgactagtgagatggcctggggaagctgtgaaagaaccaaaagagatcacaatactcaaaagagagagagagagaaaaaagagagatcttgatccacagaaatacatgaaatgtctggtctgtccaccccatcaacaagtcttgaaacaagcaacagatggatagtctgtccaaatggacataagacagacagcagtttccctggtggtcagggaggggttttggtgatacccaagttattgggatgtcatcttcctggaagcagagctggggagggagagccatcaccttgataatgggatgaatggaaggaggcttaggactttccactcctggctgagagaggaagagctgcaacggaattaggaagaccaagacacagatcacccggggcttacttagcctacagatgtcctacgggaacgtgggctggcccagcatagggctagcaaatttgagttggatgattgtttttgctcaaggcaaccagaggaaacttgcatacagagacagatatactgggagaaatgactttgaaaacctggctctaaggtgggatcactaagggatggggcagtctctgcccaaacataaagagaactctggggagcctgagccacaaaaatgttcctttattttatgtaaaccctcaagggttatagactgccatgctagacaagcttgtccatgtaatattcccatgtttttaccctgcccctgccttgattagactcctagcacctggctagtttctaacatgttttgtgcagcacagtttttaataaatgcttgttacattcatttaaaaaaaaaaaaaa

SEQ ID NO: 228 - DNA, 2646 bp, Homo sapiens
ccctttctgtatttgagttctaccgtcagtcctggcattatttctctctctacaaggagccttaggaggtacggggagctcgcaaatactccttttggtttattcttaccaccttgcttctgtgttccttgggaatgctgctgtgcttatgcatctggtctctttttggagctacagtggacaggcatttgtgacagcactatgggactgagtaacattctctttgtgatggccttcctgctctctggtgctgctcctctgaagattcaagcttatttcaatgagactgcagacctgccatgccaatttgcaaactctcaaaaccaaagcctgagtgagctagtagtattttggcaggaccaggaaaacttggttctgaatgaggtatacttaggcaaagagaaatttgacagtgttcattccaagtatatgggccgcacaagttttgattcggacagttggaccctgagacttcacaatcttcagatcaaggacaagggcttgtatcaatgtatcatccatcacaaaaagcccacaggaatgattcgcatccaccagatgaattctgaactgtcagtgcttgctaacttcagtcaacctgaaatagtaccaatttctaatataacagaaaatgtgtacataaatttgacctgctcatctatacacggttacccagaacctaagaagatgagtgttttgctaagaaccaagaattcaactatcgagtatgatggtattatgcagaaatctcaagataatgtcacagaactgtacgacgtttccatcagcttgtctgtttcattccctgatgttacgagcaatatgaccatcttctgtattctggaaactgacaagacgcggcttttatcttcacctttctctataggaaccaacacaatggagagggaagagagtgaacagaccaagaaaagagaaaaaatccatatacctgaaagatctgatgaagcccagcgtgtttttaaaagttcgaagacatcttcatgcgacaaaagtgatacatgtttttaattaaagagtaaagcccatacaagtattcattttttctaccctttcctttgtaagttcctgggcaacctttttgatttcttccagaaggcaaaaagacattaccatgagtaataagggggctccaggactccctctaagtggaatagcctccctgtaactccagctctgctccgtatgccaagaggagactttaattctcttactgcttcttttcacttcagagcacacttatgggccaagcccagcttaatggctcatgacctggaaataaaatttaggaccaatacctcctccagatcagattcttctcttaatttcatagattgtgttttttttttaaatagacctctcaatttctggaaaactgccttttatctgcccagaattctaagctggtgccccactgaattttgtgtacctgtgactaaacaactacctcctcagtctgggtgggacttatgtatttatgaccttatagtgttaatatcttgaaacatagagatctatgtactgtaatagtgtgattactatgctctagagaaaagtctacccctgctaaggagttctcatccctctgtcagggtcagtaaggaaaacggtggcctagggtacaggcaacaatgagcagaccaacctaaatttggggaaattaggagaggcagagatagaacctggagccacttctatctgggctgttgctaatattgaggaggcttgccccacccaacaagccatagtggagagaactgaataaacaggaaaatgccagagcttgtgaaccctgtttctcttgaagaactgactagtgagatggcctggggaagctgtgaaagaaccaaaagagatcacaatactcaaaagagagagagagagaaaaaagagagatcttgatccacagaaatacatgaaatgtctggtctgtccaccccatcaacaagtcttgaaacaagcaacagatggatagtctgtccaaatggacataagacagacagcagtttccctggtggtcagggaggggttttggtgatacccaagttattgggatgtcatcttcctggaagcagagctggggagggagagccatcaccttgataatgggatgaatggaaggaggcttaggactttccactcctggctgagagaggaagagctgcaacggaattaggaagaccaagacacagatcacccggggcttacttagcctacagatgtcctacgggaacgtgggctggcccagcatagggctagcaaatttgagttggatgattgtttttgctcaaggcaaccagaggaaacttgcatacagagacagatatactgggagaaatgactttgaaaacctggctctaaggtgggatcactaagggatggggcagtctctgcccaaacataaagagaactctggggagcctgagccacaaaaatgttcctttattttatgtaaaccctcaagggttatagactgccatgctagacaagcttgtccatgtaatattcccatgtttttaccctgcccctgccttgattagactcctagcacctggctagtttctaacatgttttgtgcagcacagtttttaataaatgcttgttacattcatttaaaaaaaaaaaaaa

SEQ ID NO: 229 - DNA, 2399 bp, Homo sapiens
agtcattgccgaggaaggcttgcacagggtgaaagctttgcttctctgctgctgtaacagggactagcacagacacacggatgagtggggtcatttccagatattaggtcacagcagaagcagccaaaatggatccccagtgcactatgggactgagtaacattctctttgtgatggccttcctgctctctgctaacttcagtcaacctgaaatagtaccaatttctaatataacagaaaatgtgtacataaatttgacctgctcatctatacacggttacccagaacctaagaagatgagtgttttgctaagaaccaagaattcaactatcgagtatgatggtattatgcagaaatctcaagataatgtcacagaactgtacgacgtttccatcagcttgtctgtttcattccctgatgttacgagcaatatgaccatcttctgtattctggaaactgacaagacgcggcttttatcttcacctttctctatagagcttgaggaccctcagcctcccccagaccacattccttggattacagctgtacttccaacagttattatatgtgtgatggttttctgtctaattctatggaaatggaagaagaagaagcggcctcgcaactcttataaatgtggaaccaacacaatggagagggaagagagtgaacagaccaagaaaagagaaaaaatccatatacctgaaagatctgatgaagcccagcgtgtttttaaaagttcgaagacatcttcatgcgacaaaagtgatacatgtttttaattaaagagtaaagcccatacaagtattcattttttctaccctttcctttgtaagttcctgggcaacctttttgatttcttccagaaggcaaaaagacattaccatgagtaataagggggctccaggactccctctaagtggaatagcctccctgtaactccagctctgctccgtatgccaagaggagactttaattctcttactgcttcttttcacttcagagcacacttatgggccaagcccagcttaatggctcatgacctggaaataaaatttaggaccaatacctcctccagatcagattcttctcttaatttcatagattgtgttttttttttaaatagacctctcaatttctggaaaactgccttttatctgcccagaattctaagctggtgccccactgaattttgtgtacctgtgactaaacaactacctcctcagtctgggtgggacttatgtatttatgaccttatagtgttaatatcttgaaacatagagatctatgtactgtaatagtgtgattactatgctctagagaaaagtctacccctgctaaggagttctcatccctctgtcagggtcagtaaggaaaacggtggcctagggtacaggcaacaatgagcagaccaacctaaatttggggaaattaggagaggcagagatagaacctggagccacttctatctgggctgttgctaatattgaggaggcttgccccacccaacaagccatagtggagagaactgaataaacaggaaaatgccagagcttgtgaaccctgtttctcttgaagaactgactagtgagatggcctggggaagctgtgaaagaaccaaaagagatcacaatactcaaaagagagagagagagaaaaaagagagatcttgatccacagaaatacatgaaatgtctggtctgtccaccccatcaacaagtcttgaaacaagcaacagatggatagtctgtccaaatggacataagacagacagcagtttccctggtggtcagggaggggttttggtgatacccaagttattgggatgtcatcttcctggaagcagagctggggagggagagccatcaccttgataatgggatgaatggaaggaggcttaggactttccactcctggctgagagaggaagagctgcaacggaattaggaagaccaagacacagatcacccggggcttacttagcctacagatgtcctacgggaacgtgggctggcccagcatagggctagcaaatttgagttggatgattgtttttgctcaaggcaaccagaggaaacttgcatacagagacagatatactgggagaaatgactttgaaaacctggctctaaggtgggatcactaagggatggggcagtctctgcccaaacataaagagaactctggggagcctgagccacaaaaatgttcctttattttatgtaaaccctcaagggttatagactgccatgctagacaagcttgtccatgtaatattcccatgtttttaccctgcccctgccttgattagactcctagcacctggctagtttctaacatgttttgtgcagcacagtttttaataaatgcttgttacattcatttaaaaaaaaaaaaaa

SEQ ID NO: 230 - DNA, 2685 bp, Homo sapiens
agtcattgccgaggaaggcttgcacagggtgaaagctttgcttctctgctgctgtaacagggactagcacagacacacggatgagtggggtcatttccagatattaggtcacagcagaagcagccaaaatggatccccagtggtgctgctcctctgaagattcaagcttatttcaatgagactgcagacctgccatgccaatttgcaaactctcaaaaccaaagcctgagtgagctagtagtattttggcaggaccaggaaaacttggttctgaatgaggtatacttaggcaaagagaaatttgacagtgttcattccaagtatatgggccgcacaagttttgattcggacagttggaccctgagacttcacaatcttcagatcaaggacaagggcttgtatcaatgtatcatccatcacaaaaagcccacaggaatgattcgcatccaccagatgaattctgaactgtcagtgcttgctaacttcagtcaacctgaaatagtaccaatttctaatataacagaaaatgtgtacataaatttgacctgctcatctatacacggttacccagaacctaagaagatgagtgttttgctaagaaccaagaattcaactatcgagtatgatggtattatgcagaaatctcaagataatgtcacagaactgtacgacgtttccatcagcttgtctgtttcattccctgatgttacgagcaatatgaccatcttctgtattctggaaactgacaagacgcggcttttatcttcacctttctctatagagcttgaggaccctcagcctcccccagaccacattccttggattacagctgtacttccaacagttattatatgtgtgatggttttctgtctaattctatggaaatggaagaagaagaagcggcctcgcaactcttataaatgtggaaccaacacaatggagagggaagagagtgaacagaccaagaaaagagaaaaaatccatatacctgaaagatctgatgaagcccagcgtgtttttaaaagttcgaagacatcttcatgcgacaaaagtgatacatgtttttaattaaagagtaaagcccatacaagtattcattttttctaccctttcctttgtaagttcctgggcaacctttttgatttcttccagaaggcaaaaagacattaccatgagtaataagggggctccaggactccctctaagtggaatagcctccctgtaactccagctctgctccgtatgccaagaggagactttaattctcttactgcttcttttcacttcagagcacacttatgggccaagcccagcttaatggctcatgacctggaaataaaatttaggaccaatacctcctccagatcagattcttctcttaatttcatagattgtgttttttttttaaatagacctctcaatttctggaaaactgccttttatctgcccagaattctaagctggtgccccactgaattttgtgtacctgtgactaaacaactacctcctcagtctgggtgggacttatgtatttatgaccttatagtgttaatatcttgaaacatagagatctatgtactgtaatagtgtgattactatgctctagagaaaagtctacccctgctaaggagttctcatccctctgtcagggtcagtaaggaaaacggtggcctagggtacaggcaacaatgagcagaccaacctaaatttggggaaattaggagaggcagagatagaacctggagccacttctatctgggctgttgctaatattgaggaggcttgccccacccaacaagccatagtggagagaactgaataaacaggaaaatgccagagcttgtgaaccctgtttctcttgaagaactgactagtgagatggcctggggaagctgtgaaagaaccaaaagagatcacaatactcaaaagagagagagagagaaaaaagagagatcttgatccacagaaatacatgaaatgtctggtctgtccaccccatcaacaagtcttgaaacaagcaacagatggatagtctgtccaaatggacataagacagacagcagtttccctggtggtcagggaggggttttggtgatacccaagttattgggatgtcatcttcctggaagcagagctggggagggagagccatcaccttgataatgggatgaatggaaggaggcttaggactttccactcctggctgagagaggaagagctgcaacggaattaggaagaccaagacacagatcacccggggcttacttagcctacagatgtcctacgggaacgtgggctggcccagcatagggctagcaaatttgagttggatgattgtttttgctcaaggcaaccagaggaaacttgcatacagagacagatatactgggagaaatgactttgaaaacctggctctaaggtgggatcactaagggatggggcagtctctgcccaaacataaagagaactctggggagcctgagccacaaaaatgttcctttattttatgtaaaccctcaagggttatagactgccatgctagacaagcttgtccatgtaatattcccatgtttttaccctgcccctgccttgattagactcctagcacctggctagtttctaacatgttttgtgcagcacagtttttaataaatgcttgttacattcatttaaaaaaaaaaaaaa

SEQ ID NO: 231 - DNA, 2025 bp, Homo sapiens
agttagagccgatctcccgcgccccgaggttgctcctctccgaggtctcccgcggcccaagttctccgcgccccgaggtctccgcgccccgaggtctccgcggcccgaggtctccgcccgcaccatgcggctgggcagtcctggactgctcttcctgctcttcagcagccttcgagctgatactcaggagaaggaagtcagagcgatggtaggcagcgacgtggagctcagctgcgcttgccctgaaggaagccgttttgatttaaatgatgtttacgtatattggcaaaccagtgagtcgaaaaccgtggtgacctaccacatcccacagaacagctccttggaaaacgtggacagccgctaccggaaccgagccctgatgtcaccggccggcatgctgcggggcgacttctccctgcgcttgttcaacgtcaccccccaggacgagcagaagtttcactgcctggtgttgagccaatccctgggattccaggaggttttgagcgttgaggttacactgcatgtggcagcaaacttcagcgtgcccgtcgtcagcgccccccacagcccctcccaggatgagctcaccttcacgtgtacatccataaacggctaccccaggcccaacgtgtactggatcaataagacggacaacagcctgctggaccaggctctgcagaatgacaccgtcttcttgaacatgcggggcttgtatgacgtggtcagcgtgctgaggatcgcacggacccccagcgtgaacattggctgctgcatagagaacgtgcttctgcagcagaacctgactgtcggcagccagacaggaaatgacatcggagagagagacaagatcacagagaatccagtcagtaccggcgagaaaaacgcggccacgtggagcatcctggctgtcctgtgcctgcttgtggtcgtggcggtggccataggctgggtgtgcagggaccgatgcctccaacacagctatgcaggtgcctgggctgtgagtccggagacagagctcactggtgagtttgccgtgggaagcagcaggttctggggggcccaggggaggcttggctgccagctgtctttcagagtttcaaaaaactttcaaaaggcaaaagtcccttgccttgaacaactgttgttcctggagacgcagcgaagccctcgatggtgcgcatggcatttcctgcagcctccccttggcatgggatggcatcctggtgtgcactttgtcacactgcgatgggattttcccaacatgcacagaagcagagagacgagtgctagacccccgcgctccccagtgcccagccccgaccagggtgtccagggcgggtccaggcaccggcgcccagcccccatggggtgtccggagtgggtccaggcaccggcgcccagcccccgtggggtgtccagggcgggtccaggcaccggcgcccagcccctgtggggtgtccggagtgggtccgggcaccgccagcttctctctgtggcagccactcctgcagctctcgtttgcccctcagttccaggagcaacatagatgtggattcctgtccaatttgggaaaaatgtccacacacggtcacccacctggcaggtgcctctggctgcaaggggcgctgggcttcgcaggcaggccagccgggctccccgccatgggccaggatcccctccgagccctgtttgccgcccaggagaaggggttccccggggacagtgggctcagggtgtgcgcagccaccatgctgtggtgtcacctgtggacccaggcgagctgatggccgaccgcagaaacgcacttccaaggccaggtcggcccatccagatgatgcaggaacacagcttgctaaaaacacggccggcctgttcccgtcggagccagtcgaagttccctgaacaggccgctgtttccgaagctttaaaccctgtgtttccaccaagctgagtcctgagaaaaccgacgtctgcctgcagaagggaaaggggtgcttcatgttcctctctctccttcatctccct

SEQ ID NO: 232 - DNA, 3484 bp, Homo sapiens
ggccctgggacctttgcctattttctgattgataggctttgttttgtctttacctccttctttctggggaaaacttcagttttatcgcacgttccccttttccatatcttcatcttccctctacccagattgtgaagatggaaagggtccaacccctggaagagaatgtgggaaatgcagccaggccaagattcgagaggaacaagctattgctggtggcctctgtaattcagggactggggctgctcctgtgcttcacctacatctgcctgcacttctctgctcttcaggtatcacatcggtatcctcgaattcaaagtatcaaagtacaatttaccgaatataagaaggagaaaggtttcatcctcacttcccaaaaggaggatgaaatcatgaaggtgcagaacaactcagtcatcatcaactgtgatgggttttatctcatctccctgaagggctacttctcccaggaagtcaacattagccttcattaccagaaggatgaggagcccctcttccaactgaagaaggtcaggtctgtcaactccttgatggtggcctctctgacttacaaagacaaagtctacttgaatgtgaccactgacaatacctccctggatgacttccatgtgaatggcggagaactgattcttatccatcaaaatcctggtgaattctgtgtcctttgaggggctgatggcaatatctaaaaccaggcaccagcatgaacaccaagctgggggtggacagggcatggattcttcattgcaagtgaaggagcctcccagctcagccacgtgggatgtgacaagaagcagatcctggccctcccgcccccacccctcagggatatttaaaacttattttatataccagttaatcttatttatccttatattttctaaattgcctagccgtcacaccccaagattgccttgagcctactaggcacctttgtgagaaagaaaaaatagatgcctcttcttcaagatgcattgtttctattggtcaggcaattgtcataataaacttatgtcattgaaaacggtacctgactaccatttgctggaaatttgacatgtgtgtggcattatcaaaatgaagaggagcaaggagtgaaggagtggggttatgaatctgccaaaggtggtatgaaccaacccctggaagccaaagcggcctctccaaggttaaattgattgcagtttgcatattgcctaaatttaaactttctcatttggtgggggttcaaaagaagaatcagcttgtgaaaaatcaggacttgaagagagccgtctaagaaataccacgtgctttttttctttaccattttgctttcccagcctccaaacatagttaatagaaatttcccttcaaagaactgtctggggatgtgatgctttgaaaaatctaatcagtgacttaagagagattttcttgtatacagggagagtgagataacttattgtgaagggttagctttactgtacaggatagcagggaactggacatctcagggtaaaagtcagtacggattttaatagcctggggaggaaaacacattctttgccacagacaggcaaagcaacacatgctcatcctcctgcctatgctgagatacgcactcagctccatgtcttgtacacacagaaacattgctggtttcaagaaatgaggtgatcctattatcaaattcaatctgatgtcaaatagcactaagaagttattgtgccttatgaaaaataatgatctctgtctagaaataccatagaccatatatagtctcacattgataattgaaactagaagggtctataatcagcctatgccagggcttcaatggaatagtatccccttatgtttagttgaaatgtccccttaacttgatataatgtgttatgcttatggcgctgtggacaatctgatttttcatgtcaactttccagatgatttgtaacttctctgtgccaaaccttttataaacataaatttttgagatatgtattttaaaattgtagcacatgtttccctgacattttcaatagaggatacaacatcacagaatctttctggatgattctgtgttatcaaggaattgtactgtgctacaattatctctagaatctccagaaaggtggagggctgttcgcccttacactaaatggtctcagttggatttttttttcctgttttctatttcctcttaagtacaccttcaactatattcccatccctctattttaatctgttatgaaggaaggtaaataaaaatgctaaatagaagaaattgtaggtaaggtaagaggaatcaagttctgagtggctgccaaggcactcacagaatcataatcatggctaaatatttatggagggcctactgtggaccaggcactgggctaaatacttacatttacaagaatcattctgagacagatattcaatgatatctggcttcactactcagaagattgtgtgtgtgtttgtgtgtgtgtgtgtgtgtgtatttcactttttgttattgaccatgttctgcaaaattgcagttactcagtgagtgatatccgaaaaagtaaacgtttatgactataggtaatatttaagaaaatgcatggttcatttttaagtttggaatttttatctatatttctcacagatgtgcagtgcacatgcaggcctaagtatatgttgtgtgtgttgtttgtctttgatgtcatggtcccctctcttaggtgctcactcgctttgggtgcacctggcctgctcttcccatgttggcctctgcaaccacacagggatatttctgctatgcaccagcctcactccaccttccttccatcaaaaatatgtgtgtgtgtctcagtccctgtaagtcatgtccttcacagggagaattaacccttcgatatacatggcagagttttgtgggaaaagaattgaatgaaaagtcaggagatcagaattttaaatttgacttagccactaactagccatgtaaccttgggaaagtcatttcccatttctgggtcttgcttttctttctgttaaatgagaggaatgttaaatatctaacagtttagaatcttatgcttacagtgttatctgtgaatgcacatattaaatgtctatgttcttgttgctatgagtcaaggagtgtaaccttctcctttactatgttgaatgtatttttttctggacaagcttacatcttcctcagccatctttgtgagtccttcaagagcagttatcaattgttagttagatattttctatttagagaatgcttaagggattccaatcccgatccaaatcataatttgttcttaagtatactgggcaggtcccctattttaagtcataattttgtatttagtgctttcctggctctcagagagtattaatattgatattaataatatagttaatagtaatattgctatttacatggaaacaaataaaagatctcagaattcactaaaaaaaaaaa

SEQ ID NO: 233 - DNA, 1450 bp, Homo sapiens
tttcgctttcattttgggccgagctggaggcggcggggccgtcccggaacggctgcggccgggcaccccgggagttaatccgaaagcgccgcaagccccgcgggccggccgcaccgcacgtgtcaccgagaagctgatgtagagagagacacagaaggagacagaaagcaagagaccagagtcccgggaaagtcctgccgcgcctcgggacaattataaaaatgtggccccctgggtcagcctcccagccaccgccctcacctgccgcggccacaggtctgcatccagcggctcgccctgtgtccctgcagtgccggctcagcatgtgtccagcgcgcagcctcctccttgtggctaccctggtcctcctggaccacctcagtttggccagaaacctccccgtggccactccagacccaggaatgttcccatgccttcaccactcccaaaacctgctgagggccgtcagcaacatgctccagaaggccagacaaactctagaattttacccttgcacttctgaagagattgatcatgaagatatcacaaaagataaaaccagcacagtggaggcctgtttaccattggaattaaccaagaatgagagttgcctaaattccagagagacctctttcataactaatgggagttgcctggcctccagaaagacctcttttatgatggccctgtgccttagtagtatttatgaagacttgaagatgtaccaggtggagttcaagaccatgaatgcaaagcttctgatggatcctaagaggcagatctttctagatcaaaacatgctggcagttattgatgagctgatgcaggccctgaatttcaacagtgagactgtgccacaaaaatcctcccttgaagaaccggatttttataaaactaaaatcaagctctgcatacttcttcatgctttcagaattcgggcagtgactattgatagagtgatgagctatctgaatgcttcctaaaaagcgaggtccctccaaaccgttgtcatttttataaaactttgaaatgaggaaactttgataggatgtggattaagaactagggagggggaaagaaggatgggactattacatccacatgatacctctgatcaagtatttttgacatttactgtggataaattgtttttaagttttcatgaatgaattgctaagaagggaaaatatccatcctgaaggtgtttttcattcactttaatagaagggcaaatatttataagctatttctgtaccaaagtgtttgtggaaacaaacatgtaagcataacttattttaaaatatttatttatataacttggtaatcatgaaagcatctgagctaacttatatttatttatgttatatttattaaattatttatcaagtgtatttgaaaaatatttttaagtgttctaaaaataaaagtattgaattaaagtgaaaaaaaa

SEQ ID NO: 234 - DNA, 2207 bp, Homo sapiens
cacttcctccccagacaggggtagtgcgaggccgggcacagccttcctgtgtggttttaccgcccagagagcgtcatggacctggggaaaccaatgaaaagcgtgctggtggtggctctccttgtcattttccaggtatgcctgtgtcaagatgaggtcacggacgattacatcggagacaacaccacagtggactacactttgttcgagtctttgtgctccaagaaggacgtgcggaactttaaagcctggttcctccctatcatgtactccatcatttgtttcgtgggcctactgggcaatgggctggtcgtgttgacctatatctatttcaagaggctcaagaccatgaccgatacctacctgctcaacctggcggtggcagacatcctcttcctcctgacccttcccttctgggcctacagcgcggccaagtcctgggtcttcggtgtccacttttgcaagctcatctttgccatctacaagatgagcttcttcagtggcatgctcctacttctttgcatcagcattgaccgctacgtggccatcgtccaggctgtctcagctcaccgccaccgtgcccgcgtccttctcatcagcaagctgtcctgtgtgggcatctggatactagccacagtgctctccatcccagagctcctgtacagtgacctccagaggagcagcagtgagcaagcgatgcgatgctctctcatcacagagcatgtggaggcctttatcaccatccaggtggcccagatggtgatcggctttctggtccccctgctggccatgagcttctgttaccttgtcatcatccgcaccctgctccaggcacgcaactttgagcgcaacaaggccatcaaggtgatcatcgctgtggtcgtggtcttcatagtcttccagctgccctacaatggggtggtcctggcccagacggtggccaacttcaacatcaccagtagcacctgtgagctcagtaagcaactcaacatcgcctacgacgtcacctacagcctggcctgcgtccgctgctgcgtcaaccctttcttgtacgccttcatcggcgtcaagttccgcaacgatctcttcaagctcttcaaggacctgggctgcctcagccaggagcagctccggcagtggtcttcctgtcggcacatccggcgctcctccatgagtgtggaggccgagaccaccaccaccttctccccataggcgactcttctgcctggactagagggacctctcccagggtccctggggtggggatagggagcagatgcaatgactcaggacatccccccgccaaaagctgctcagggaaaagcagctctcccctcagagtgcaagcccctgctccagaagatagcttcaccccaatcccagctacctcaaccaatgccaaaaaaagacagggctgataagctaacaccagacagacaacactgggaaacagaggctattgtcccctaaaccaaaaactgaaagtgaaagtccagaaactgttcccacctgctggagtgaaggggccaaggagggtgagtgcaaggggcgtgggagtggcctgaagagtcctctgaatgaaccttctggcctcccacagactcaaatgctcagaccagctcttccgaaaaccaggccttatctccaagaccagagatagtggggagacttcttggcttggtgaggaaaagcggacatcagctggtcaaacaaactctctgaacccctccctccatcgttttcttcactgtcctccaagccagcgggaatggcagctgccacgccgccctaaaagcacactcatcccctcacttgccgcgtcgccctcccaggctctcaacaggggagagtgtggtgtttcctgcaggccaggccagctgcctccgcgtgatcaaagccacactctgggctccagagtggggatgacatgcactcagctcttggctccactgggatgggaggagaggacaagggaaatgtcaggggcggggagggtgacagtggccgcccaaggcccacgagcttgttctttgttctttgtcacagggactgaaaacctctcctcatgttctgctttcgattcgttaagagagcaacattttacccacacacagataaagttttcccttgaggaaacaacagctttaaaagaaaaagaaaaaaaaagtctttggtaaatggcaaaaaaaaaaaaaaaaaaaaaaaaa

SEQ ID NO: 235-329 - skipped (95 entries)

SEQ ID NO: 330 - DNA, 20 bp, Homo Sapiens
gacaagtactgagtgaactc

SEQ ID NO: 331 - DNA, 20 bp, Homo Sapiens
acaagtactgagtgaactca

SEQ ID NO: 332 - DNA, 20 bp, Homo Sapiens
caagtactgagtgaactcaa

SEQ ID NO: 333 - DNA, 20 bp, Homo Sapiens
aagtactgagtgaactcaaa

SEQ ID NO: 334 - DNA, 20 bp, Homo Sapiens
agtactgagtgaactcaaac

SEQ ID NO: 335 - DNA, 20 bp, Homo Sapiens
gtactgagtgaactcaaacc

SEQ ID NO: 336 - DNA, 20 bp, Homo Sapiens
tactgagtgaactcaaaccc

SEQ ID NO: 337 - DNA, 20 bp, Homo Sapiens
actgagtgaactcaaaccct

SEQ ID NO: 338 - DNA, 20 bp, Homo Sapiens
ctgagtgaactcaaaccctc

SEQ ID NO: 339 - DNA, 20 bp, Homo Sapiens
tgagtgaactcaaaccctct

SEQ ID NO: 340 - DNA, 20 bp, Homo Sapiens
gagtgaactcaaaccctctg

SEQ ID NO: 341 - DNA, 20 bp, Homo Sapiens
agtgaactcaaaccctctgt

SEQ ID NO: 342 - DNA, 20 bp, Homo Sapiens
gtgaactcaaaccctctgta

SEQ ID NO: 343 - DNA, 20 bp, Homo Sapiens
tgaactcaaaccctctgtaa

SEQ ID NO: 344 - DNA, 20 bp, Homo Sapiens
gaactcaaaccctctgtaaa

SEQ ID NO: 345 - DNA, 20 bp, Homo Sapiens
aactcaaaccctctgtaaag

SEQ ID NO: 346 - DNA, 20 bp, Homo Sapiens
actcaaaccctctgtaaagt

SEQ ID NO: 347 - DNA, 20 bp, Homo Sapiens
ctcaaaccctctgtaaagta

SEQ ID NO: 348 - DNA, 20 bp, Homo Sapiens
tcaaaccctctgtaaagtaa

SEQ ID NO: 349 - DNA, 20 bp, Homo Sapiens
caaaccctctgtaaagtaac

SEQ ID NO: 350 - DNA, 20 bp, Homo Sapiens
aaaccctctgtaaagtaaca

SEQ ID NO: 351 - DNA, 20 bp, Homo Sapiens
aaccctctgtaaagtaacag

SEQ ID NO: 352 - DNA, 20 bp, Homo Sapiens
accctctgtaaagtaacaga

SEQ ID NO: 353 - DNA, 20 bp, Homo Sapiens
ccctctgtaaagtaacagaa

SEQ ID NO: 354 - DNA, 20 bp, Homo Sapiens
cctctgtaaagtaacagaag

SEQ ID NO: 355 - DNA, 20 bp, Homo Sapiens
ctctgtaaagtaacagaagt

SEQ ID NO: 356 - DNA, 20 bp, Homo Sapiens
tctgtaaagtaacagaagtt

SEQ ID NO: 357 - DNA, 20 bp, Homo Sapiens
ctgtaaagtaacagaagtta

SEQ ID NO: 358 - DNA, 20 bp, Homo Sapiens
tgtaaagtaacagaagttag

SEQ ID NO: 359 - DNA, 20 bp, Homo Sapiens
gtaaagtaacagaagttaga

SEQ ID NO: 360 - DNA, 20 bp, Homo Sapiens
taaagtaacagaagttagaa

SEQ ID NO: 361 - DNA, 20 bp, Homo Sapiens
aaagtaacagaagttagaag

SEQ ID NO: 362 - DNA, 20 bp, Homo Sapiens
aagtaacagaagttagaagg

SEQ ID NO: 363 - DNA, 20 bp, Homo Sapiens
agtaacagaagttagaaggg

SEQ ID NO: 364 - DNA, 20 bp, Homo Sapiens
gtaacagaagttagaagggg

SEQ ID NO: 365 - DNA, 20 bp, Homo Sapiens
taacagaagttagaagggga

SEQ ID NO: 366 - DNA, 20 bp, Homo Sapiens
aacagaagttagaaggggaa

SEQ ID NO: 367 - DNA, 20 bp, Homo Sapiens
acagaagttagaaggggaaa

SEQ ID NO: 368 - DNA, 20 bp, Homo Sapiens
cagaagttagaaggggaaat

SEQ ID NO: 369 - DNA, 20 bp, Homo Sapiens
agaagttagaaggggaaatg

SEQ ID NO: 370 - DNA, 20 bp, Homo Sapiens
gaagttagaaggggaaatgt

SEQ ID NO: 371 - DNA, 20 bp, Homo Sapiens
aagttagaaggggaaatgtc

SEQ ID NO: 372 - DNA, 20 bp, Homo Sapiens
agttagaaggggaaatgtcg

SEQ ID NO: 373 - DNA, 20 bp, Homo Sapiens
gttagaaggggaaatgtcgc

SEQ ID NO: 374 - DNA, 20 bp, Homo Sapiens
ttagaaggggaaatgtcgcc

SEQ ID NO: 375 - DNA, 20 bp, Homo Sapiens
tagaaggggaaatgtcgcct

SEQ ID NO: 376 - DNA, 20 bp, Homo Sapiens
agaaggggaaatgtcgcctc

SEQ ID NO: 377 - DNA, 20 bp, Homo Sapiens
gaaggggaaatgtcgcctct

SEQ ID NO: 378 - DNA, 20 bp, Homo Sapiens
aaggggaaatgtcgcctctc

SEQ ID NO: 379 - DNA, 20 bp, Homo Sapiens
aggggaaatgtcgcctctct

SEQ ID NO: 380 - DNA, 20 bp, Homo Sapiens
ggggaaatgtcgcctctctg

SEQ ID NO: 381 - DNA, 20 bp, Homo Sapiens
gggaaatgtcgcctctctga

SEQ ID NO: 382 - DNA, 20 bp, Homo Sapiens
ggaaatgtcgcctctctgaa

SEQ ID NO: 383 - DNA, 20 bp, Homo Sapiens
gaaatgtcgcctctctgaag

SEQ ID NO: 384 - DNA, 20 bp, Homo Sapiens
aaatgtcgcctctctgaaga

SEQ ID NO: 385 - DNA, 20 bp, Homo Sapiens
aatgtcgcctctctgaagat

SEQ ID NO: 386 - DNA, 20 bp, Homo Sapiens
atgtcgcctctctgaagatt

SEQ ID NO: 387 - DNA, 20 bp, Homo Sapiens
tgtcgcctctctgaagatta

SEQ ID NO: 388 - DNA, 20 bp, Homo Sapiens
gtcgcctctctgaagattac

SEQ ID NO: 389 - DNA, 20 bp, Homo Sapiens
tcgcctctctgaagattacc

SEQ ID NO: 390 - DNA, 20 bp, Homo Sapiens
cgcctctctgaagattaccc

SEQ ID NO: 391 - DNA, 20 bp, Homo Sapiens
gcctctctgaagattaccca

SEQ ID NO: 392 - DNA, 20 bp, Homo Sapiens
cctctctgaagattacccaa

SEQ ID NO: 393 - DNA, 20 bp, Homo Sapiens
ctctctgaagattacccaaa

SEQ ID NO: 394 - DNA, 20 bp, Homo Sapiens
tctctgaagattacccaaag

SEQ ID NO: 395 - DNA, 20 bp, Homo Sapiens
ctctgaagattacccaaaga

SEQ ID NO: 396 - DNA, 20 bp, Homo Sapiens
tctgaagattacccaaagaa

SEQ ID NO: 397 - DNA, 20 bp, Homo Sapiens
ctgaagattacccaaagaaa

SEQ ID NO: 398 - DNA, 20 bp, Homo Sapiens
tgaagattacccaaagaaaa

SEQ ID NO: 399 - DNA, 20 bp, Homo Sapiens
gaagattacccaaagaaaaa

SEQ ID NO: 400 - DNA, 20 bp, Homo Sapiens
aagattacccaaagaaaaag

SEQ ID NO: 401 - DNA, 20 bp, Homo Sapiens
agattacccaaagaaaaagt

SEQ ID NO: 402 - DNA, 20 bp, Homo Sapiens
gattacccaaagaaaaagtg

SEQ ID NO: 403 - DNA, 20 bp, Homo Sapiens
attacccaaagaaaaagtga

SEQ ID NO: 404 - DNA, 20 bp, Homo Sapiens
ttacccaaagaaaaagtgat

SEQ ID NO: 405 - DNA, 20 bp, Homo Sapiens
tacccaaagaaaaagtgatt

SEQ ID NO: 406 - DNA, 20 bp, Homo Sapiens
acccaaagaaaaagtgattt

SEQ ID NO: 407 - DNA, 20 bp, Homo Sapiens
cccaaagaaaaagtgatttg

SEQ ID NO: 408 - DNA, 20 bp, Homo Sapiens
ccaaagaaaaagtgatttgt

SEQ ID NO: 409 - DNA, 20 bp, Homo Sapiens
caaagaaaaagtgatttgtc

SEQ ID NO: 410 - DNA, 20 bp, Homo Sapiens
aaagaaaaagtgatttgtca

SEQ ID NO: 411 - DNA, 20 bp, Homo Sapiens
aagaaaaagtgatttgtcat

SEQ ID NO: 412 - DNA, 20 bp, Homo Sapiens
agaaaaagtgatttgtcatt

SEQ ID NO: 413 - DNA, 20 bp, Homo Sapiens
gaaaaagtgatttgtcattg

SEQ ID NO: 414 - DNA, 20 bp, Homo Sapiens
aaaaagtgatttgtcattgc

SEQ ID NO: 415 - DNA, 20 bp, Homo Sapiens
aaaagtgatttgtcattgct

SEQ ID NO: 416 - DNA, 20 bp, Homo Sapiens
aaagtgatttgtcattgctt

SEQ ID NO: 417 - DNA, 20 bp, Homo Sapiens
aagtgatttgtcattgcttt

SEQ ID NO: 418 - DNA, 20 bp, Homo Sapiens
agtgatttgtcattgcttta

SEQ ID NO: 419 - DNA, 20 bp, Homo Sapiens
gtgatttgtcattgctttat

SEQ ID NO: 420 - DNA, 20 bp, Homo Sapiens
tgatttgtcattgctttata

SEQ ID NO: 421 - DNA, 20 bp, Homo Sapiens
gatttgtcattgctttatag

SEQ ID NO: 422 - DNA, 20 bp, Homo Sapiens
atttgtcattgctttataga

SEQ ID NO: 423 - DNA, 20 bp, Homo Sapiens
tttgtcattgctttatagac

SEQ ID NO: 424 - DNA, 20 bp, Homo Sapiens
ttgtcattgctttatagact

SEQ ID NO: 425 - DNA, 20 bp, Homo Sapiens
tgtcattgctttatagactg

SEQ ID NO: 426 - DNA, 20 bp, Homo Sapiens
gtcattgctttatagactgt

SEQ ID NO: 427 - DNA, 20 bp, Homo Sapiens
tcattgctttatagactgta

SEQ ID NO: 428 - DNA, 20 bp, Homo Sapiens
cattgctttatagactgtaa

SEQ ID NO: 429 - DNA, 20 bp, Homo Sapiens
attgctttatagactgtaag

SEQ ID NO: 430 - DNA, 20 bp, Homo Sapiens
ttgctttatagactgtaaga

SEQ ID NO: 431 - DNA, 20 bp, Homo Sapiens
tgctttatagactgtaagaa

SEQ ID NO: 432 - DNA, 20 bp, Homo Sapiens
gctttatagactgtaagaag

SEQ ID NO: 433 - DNA, 20 bp, Homo Sapiens
ctttatagactgtaagaaga

SEQ ID NO: 434 - DNA, 20 bp, Homo Sapiens
tttatagactgtaagaagag

SEQ ID NO: 435 - DNA, 20 bp, Homo Sapiens
ttatagactgtaagaagaga

SEQ ID NO: 436 - DNA, 20 bp, Homo Sapiens
tatagactgtaagaagagaa

SEQ ID NO: 437 - DNA, 20 bp, Homo Sapiens
atagactgtaagaagagaac

SEQ ID NO: 438 - DNA, 20 bp, Homo Sapiens
tagactgtaagaagagaaca

SEQ ID NO: 439 - DNA, 20 bp, Homo Sapiens
agactgtaagaagagaacat

SEQ ID NO: 440 - DNA, 20 bp, Homo Sapiens
gactgtaagaagagaacatc

SEQ ID NO: 441 - DNA, 20 bp, Homo Sapiens
actgtaagaagagaacatct

SEQ ID NO: 442 - DNA, 20 bp, Homo Sapiens
ctgtaagaagagaacatctc

SEQ ID NO: 443 - DNA, 20 bp, Homo Sapiens
tgtaagaagagaacatctca

SEQ ID NO: 444 - DNA, 20 bp, Homo Sapiens
gtaagaagagaacatctcag

SEQ ID NO: 445 - DNA, 20 bp, Homo Sapiens
taagaagagaacatctcaga

SEQ ID NO: 446 - DNA, 20 bp, Homo Sapiens
aagaagagaacatctcagaa

SEQ ID NO: 447 - DNA, 20 bp, Homo Sapiens
agaagagaacatctcagaag

SEQ ID NO: 448 - DNA, 20 bp, Homo Sapiens
gaagagaacatctcagaagt

SEQ ID NO: 449 - DNA, 20 bp, Homo Sapiens
aagagaacatctcagaagtg

SEQ ID NO: 450 - DNA, 20 bp, Homo Sapiens
agagaacatctcagaagtgg

SEQ ID NO: 451 - DNA, 20 bp, Homo Sapiens
gagaacatctcagaagtgga

SEQ ID NO: 452 - DNA, 20 bp, Homo Sapiens
agaacatctcagaagtggag

SEQ ID NO: 453 - DNA, 20 bp, Homo Sapiens
gaacatctcagaagtggagt

SEQ ID NO: 454 - DNA, 20 bp, Homo Sapiens
aacatctcagaagtggagtc

SEQ ID NO: 455 - DNA, 20 bp, Homo Sapiens
acatctcagaagtggagtct

SEQ ID NO: 456 - DNA, 20 bp, Homo Sapiens
catctcagaagtggagtctt

SEQ ID NO: 457 - DNA, 20 bp, Homo Sapiens
atctcagaagtggagtctta

SEQ ID NO: 458 - DNA, 20 bp, Homo Sapiens
tctcagaagtggagtcttac

SEQ ID NO: 459 - DNA, 20 bp, Homo Sapiens
ctcagaagtggagtcttacc

SEQ ID NO: 460 - DNA, 20 bp, Homo Sapiens
tcagaagtggagtcttaccc

SEQ ID NO: 461 - DNA, 20 bp, Homo Sapiens
cagaagtggagtcttaccct

SEQ ID NO: 462 - DNA, 20 bp, Homo Sapiens
agaagtggagtcttaccctg

SEQ ID NO: 463 - DNA, 20 bp, Homo Sapiens
gaagtggagtcttaccctga

SEQ ID NO: 464 - DNA, 20 bp, Homo Sapiens
aagtggagtcttaccctgaa

SEQ ID NO: 465 - DNA, 20 bp, Homo Sapiens
agtggagtcttaccctgaaa

SEQ ID NO: 466 - DNA, 20 bp, Homo Sapiens
gtggagtcttaccctgaaat

SEQ ID NO: 467 - DNA, 20 bp, Homo Sapiens
tggagtcttaccctgaaatc

SEQ ID NO: 468 - DNA, 20 bp, Homo Sapiens
ggagtcttaccctgaaatca

SEQ ID NO: 469 - DNA, 20 bp, Homo Sapiens
gagtcttaccctgaaatcaa

SEQ ID NO: 470 - DNA, 20 bp, Homo Sapiens
agtcttaccctgaaatcaaa

SEQ ID NO: 471 - DNA, 20 bp, Homo Sapiens
gtcttaccctgaaatcaaag

SEQ ID NO: 472 - DNA, 20 bp, Homo Sapiens
tcttaccctgaaatcaaagg

SEQ ID NO: 473 - DNA, 20 bp, Homo Sapiens
cttaccctgaaatcaaagga

SEQ ID NO: 474 - DNA, 20 bp, Homo Sapiens
ttaccctgaaatcaaaggat

SEQ ID NO: 475 - DNA, 20 bp, Homo Sapiens
taccctgaaatcaaaggatt

SEQ ID NO: 476 - DNA, 20 bp, Homo Sapiens
accctgaaatcaaaggattt

SEQ ID NO: 477 - DNA, 20 bp, Homo Sapiens
ccctgaaatcaaaggattta

SEQ ID NO: 478 - DNA, 20 bp, Homo Sapiens
cctgaaatcaaaggatttaa

SEQ ID NO: 479 - DNA, 20 bp, Homo Sapiens
ctgaaatcaaaggatttaaa

SEQ ID NO: 480 - DNA, 20 bp, Homo Sapiens
tgaaatcaaaggatttaaag

SEQ ID NO: 481 - DNA, 20 bp, Homo Sapiens
gaaatcaaaggatttaaaga

SEQ ID NO: 482 - DNA, 20 bp, Homo Sapiens
aaatcaaaggatttaaagaa

SEQ ID NO: 483 - DNA, 20 bp, Homo Sapiens
aatcaaaggatttaaagaaa

SEQ ID NO: 484 - DNA, 20 bp, Homo Sapiens
atcaaaggatttaaagaaaa

SEQ ID NO: 485 - DNA, 20 bp, Homo Sapiens
tcaaaggatttaaagaaaaa

SEQ ID NO: 486 - DNA, 20 bp, Homo Sapiens
caaaggatttaaagaaaaag

SEQ ID NO: 487 - DNA, 20 bp, Homo Sapiens
aaaggatttaaagaaaaagt

SEQ ID NO: 488 - DNA, 20 bp, Homo Sapiens
aaggatttaaagaaaaagtg

SEQ ID NO: 489 - DNA, 20 bp, Homo Sapiens
aggatttaaagaaaaagtgg

SEQ ID NO: 490 - DNA, 20 bp, Homo Sapiens
ggatttaaagaaaaagtgga

SEQ ID NO: 491 - DNA, 20 bp, Homo Sapiens
gatttaaagaaaaagtggaa

SEQ ID NO: 492 - DNA, 20 bp, Homo Sapiens
atttaaagaaaaagtggaat

SEQ ID NO: 493 - DNA, 20 bp, Homo Sapiens
tttaaagaaaaagtggaatt

SEQ ID NO: 494 - DNA, 20 bp, Homo Sapiens
ttaaagaaaaagtggaattt

SEQ ID NO: 495 - DNA, 20 bp, Homo Sapiens
taaagaaaaagtggaatttt

SEQ ID NO: 496 - DNA, 20 bp, Homo Sapiens
aaagaaaaagtggaattttt

SEQ ID NO: 497 - DNA, 20 bp, Homo Sapiens
aagaaaaagtggaatttttc

SEQ ID NO: 498 - DNA, 20 bp, Homo Sapiens
agaaaaagtggaatttttct

SEQ ID NO: 499 - DNA, 20 bp, Homo Sapiens
gaaaaagtggaatttttctt

SEQ ID NO: 500 - DNA, 20 bp, Homo Sapiens
aaaaagtggaatttttcttc

SEQ ID NO: 501 - DNA, 20 bp, Homo Sapiens
aaaagtggaatttttcttca

SEQ ID NO: 502 - DNA, 20 bp, Homo Sapiens
aaagtggaatttttcttcag

SEQ ID NO: 503 - DNA, 20 bp, Homo Sapiens
aagtggaatttttcttcagc

SEQ ID NO: 504 - DNA, 20 bp, Homo Sapiens
agtggaatttttcttcagca

SEQ ID NO: 505 - DNA, 20 bp, Homo Sapiens
gtggaatttttcttcagcaa

SEQ ID NO: 506 - DNA, 20 bp, Homo Sapiens
tggaatttttcttcagcaag

SEQ ID NO: 507 - DNA, 20 bp, Homo Sapiens
ggaatttttcttcagcaagc

SEQ ID NO: 508 - DNA, 20 bp, Homo Sapiens
gaatttttcttcagcaagct

SEQ ID NO: 509 - DNA, 20 bp, Homo Sapiens
aatttttcttcagcaagctg

SEQ ID NO: 510 - DNA, 20 bp, Homo Sapiens
atttttcttcagcaagctgt

SEQ ID NO: 511 - DNA, 20 bp, Homo Sapiens
tttttcttcagcaagctgtg

SEQ ID NO: 512 - DNA, 20 bp, Homo Sapiens
ttttcttcagcaagctgtga

SEQ ID NO: 513 - DNA, 20 bp, Homo Sapiens
tttcttcagcaagctgtgaa

SEQ ID NO: 514 - DNA, 20 bp, Homo Sapiens
ttcttcagcaagctgtgaaa

SEQ ID NO: 515 - DNA, 20 bp, Homo Sapiens
tcttcagcaagctgtgaaac

SEQ ID NO: 516 - DNA, 20 bp, Homo Sapiens
cttcagcaagctgtgaaact

SEQ ID NO: 517 - DNA, 20 bp, Homo Sapiens
ttcagcaagctgtgaaacta

SEQ ID NO: 518 - DNA, 20 bp, Homo Sapiens
tcagcaagctgtgaaactaa

SEQ ID NO: 519 - DNA, 20 bp, Homo Sapiens
cagcaagctgtgaaactaaa

SEQ ID NO: 520 - DNA, 20 bp, Homo Sapiens
agcaagctgtgaaactaaat

SEQ ID NO: 521 - DNA, 20 bp, Homo Sapiens
gcaagctgtgaaactaaatc

SEQ ID NO: 522 - DNA, 20 bp, Homo Sapiens
caagctgtgaaactaaatcc

SEQ ID NO: 523 - DNA, 20 bp, Homo Sapiens
aagctgtgaaactaaatcca

SEQ ID NO: 524 - DNA, 20 bp, Homo Sapiens
agctgtgaaactaaatccac

SEQ ID NO: 525 - DNA, 20 bp, Homo Sapiens
gctgtgaaactaaatccaca

SEQ ID NO: 526 - DNA, 20 bp, Homo Sapiens
ctgtgaaactaaatccacaa

SEQ ID NO: 527 - DNA, 20 bp, Homo Sapiens
tgtgaaactaaatccacaac

SEQ ID NO: 528 - DNA, 20 bp, Homo Sapiens
gtgaaactaaatccacaacc

SEQ ID NO: 529 - DNA, 20 bp, Homo Sapiens
tgaaactaaatccacaacct

SEQ ID NO: 530 - DNA, 20 bp, Homo Sapiens
gaaactaaatccacaacctt

SEQ ID NO: 531 - DNA, 20 bp, Homo Sapiens
aaactaaatccacaaccttt

SEQ ID NO: 532 - DNA, 20 bp, Homo Sapiens
aactaaatccacaacctttg

SEQ ID NO: 533 - DNA, 20 bp, Homo Sapiens
actaaatccacaacctttgg

SEQ ID NO: 534 - DNA, 20 bp, Homo Sapiens
ctaaatccacaacctttgga

SEQ ID NO: 535 - DNA, 20 bp, Homo Sapiens
taaatccacaacctttggag

SEQ ID NO: 536 - DNA, 20 bp, Homo Sapiens
aaatccacaacctttggaga

SEQ ID NO: 537 - DNA, 20 bp, Homo Sapiens
aatccacaacctttggagac

SEQ ID NO: 538 - DNA, 20 bp, Homo Sapiens
atccacaacctttggagacc

SEQ ID NO: 539 - DNA, 20 bp, Homo Sapiens
tccacaacctttggagaccc

SEQ ID NO: 540 - DNA, 20 bp, Homo Sapiens
ccacaacctttggagaccca

SEQ ID NO: 541 - DNA, 20 bp, Homo Sapiens
cacaacctttggagacccag

SEQ ID NO: 542 - DNA, 20 bp, Homo Sapiens
acaacctttggagacccagg

SEQ ID NO: 543 - DNA, 20 bp, Homo Sapiens
caacctttggagacccagga

SEQ ID NO: 544 - DNA, 20 bp, Homo Sapiens
aacctttggagacccaggaa

SEQ ID NO: 545 - DNA, 20 bp, Homo Sapiens
acctttggagacccaggaac

SEQ ID NO: 546 - DNA, 20 bp, Homo Sapiens
cctttggagacccaggaaca

SEQ ID NO: 547 - DNA, 20 bp, Homo Sapiens
ctttggagacccaggaacac

SEQ ID NO: 548 - DNA, 20 bp, Homo Sapiens
tttggagacccaggaacacc

SEQ ID NO: 549 - DNA, 20 bp, Homo Sapiens
ttggagacccaggaacaccc

SEQ ID NO: 550 - DNA, 20 bp, Homo Sapiens
tggagacccaggaacaccct

SEQ ID NO: 551 - DNA, 20 bp, Homo Sapiens
ggagacccaggaacaccctc

SEQ ID NO: 552 - DNA, 20 bp, Homo Sapiens
gagacccaggaacaccctcc

SEQ ID NO: 553 - DNA, 20 bp, Homo Sapiens
agacccaggaacaccctcca

SEQ ID NO: 554 - DNA, 20 bp, Homo Sapiens
gacccaggaacaccctccaa

SEQ ID NO: 555 - DNA, 20 bp, Homo Sapiens
acccaggaacaccctccaat

SEQ ID NO: 556 - DNA, 20 bp, Homo Sapiens
cccaggaacaccctccaatc

SEQ ID NO: 557 - DNA, 20 bp, Homo Sapiens
ccaggaacaccctccaatct

SEQ ID NO: 558 - DNA, 20 bp, Homo Sapiens
caggaacaccctccaatctc

SEQ ID NO: 559 - DNA, 20 bp, Homo Sapiens
aggaacaccctccaatctct

SEQ ID NO: 560 - DNA, 20 bp, Homo Sapiens
ggaacaccctccaatctctg

SEQ ID NO: 561 - DNA, 20 bp, Homo Sapiens
gaacaccctccaatctctgt

SEQ ID NO: 562 - DNA, 20 bp, Homo Sapiens
aacaccctccaatctctgtg

SEQ ID NO: 563 - DNA, 20 bp, Homo Sapiens
acaccctccaatctctgtgt

SEQ ID NO: 564 - DNA, 20 bp, Homo Sapiens
caccctccaatctctgtgtg

SEQ ID NO: 565 - DNA, 20 bp, Homo Sapiens
accctccaatctctgtgtgt

SEQ ID NO: 566 - DNA, 20 bp, Homo Sapiens
ccctccaatctctgtgtgtt

SEQ ID NO: 567 - DNA, 20 bp, Homo Sapiens
cctccaatctctgtgtgttt

SEQ ID NO: 568 - DNA, 20 bp, Homo Sapiens
ctccaatctctgtgtgtttt

SEQ ID NO: 569 - DNA, 20 bp, Homo Sapiens
tccaatctctgtgtgttttg

SEQ ID NO: 570 - DNA, 20 bp, Homo Sapiens
ccaatctctgtgtgttttgt

SEQ ID NO: 571 - DNA, 20 bp, Homo Sapiens
caatctctgtgtgttttgta

SEQ ID NO: 572 - DNA, 20 bp, Homo Sapiens
aatctctgtgtgttttgtaa

SEQ ID NO: 573 - DNA, 20 bp, Homo Sapiens
atctctgtgtgttttgtaaa

SEQ ID NO: 574 - DNA, 20 bp, Homo Sapiens
tctctgtgtgttttgtaaac

SEQ ID NO: 575 - DNA, 20 bp, Homo Sapiens
ctctgtgtgttttgtaaaca

SEQ ID NO: 576 - DNA, 20 bp, Homo Sapiens
tctgtgtgttttgtaaacat

SEQ ID NO: 577 - DNA, 20 bp, Homo Sapiens
ctgtgtgttttgtaaacatc

SEQ ID NO: 578 - DNA, 20 bp, Homo Sapiens
tgtgtgttttgtaaacatca

SEQ ID NO: 579 - DNA, 20 bp, Homo Sapiens
gtgtgttttgtaaacatcac

SEQ ID NO: 580 - DNA, 20 bp, Homo Sapiens
tgtgttttgtaaacatcact

SEQ ID NO: 581 - DNA, 20 bp, Homo Sapiens
gtgttttgtaaacatcactg

SEQ ID NO: 582 - DNA, 20 bp, Homo Sapiens
tgttttgtaaacatcactgg

SEQ ID NO: 583 - DNA, 20 bp, Homo Sapiens
gttttgtaaacatcactgga

SEQ ID NO: 584 - DNA, 20 bp, Homo Sapiens
ttttgtaaacatcactggag

SEQ ID NO: 585 - DNA, 20 bp, Homo Sapiens
tttgtaaacatcactggagg

SEQ ID NO: 586 - DNA, 20 bp, Homo Sapiens
ttgtaaacatcactggaggg

SEQ ID NO: 587 - DNA, 20 bp, Homo Sapiens
tgtaaacatcactggagggt

SEQ ID NO: 588 - DNA, 20 bp, Homo Sapiens
gtaaacatcactggagggtc

SEQ ID NO: 589 - DNA, 20 bp, Homo Sapiens
taaacatcactggagggtct

SEQ ID NO: 590 - DNA, 20 bp, Homo Sapiens
aaacatcactggagggtctt

SEQ ID NO: 591 - DNA, 20 bp, Homo Sapiens
aacatcactggagggtcttc

SEQ ID NO: 592 - DNA, 20 bp, Homo Sapiens
acatcactggagggtcttct

SEQ ID NO: 593 - DNA, 20 bp, Homo Sapiens
catcactggagggtcttcta

SEQ ID NO: 594 - DNA, 20 bp, Homo Sapiens
atcactggagggtcttctac

SEQ ID NO: 595 - DNA, 20 bp, Homo Sapiens
tcactggagggtcttctacg

SEQ ID NO: 596 - DNA, 20 bp, Homo Sapiens
cactggagggtcttctacgt

SEQ ID NO: 597 - DNA, 20 bp, Homo Sapiens
actggagggtcttctacgtg

SEQ ID NO: 598 - DNA, 20 bp, Homo Sapiens
ctggagggtcttctacgtga

SEQ ID NO: 599 - DNA, 20 bp, Homo Sapiens
tggagggtcttctacgtgag

SEQ ID NO: 600 - DNA, 20 bp, Homo Sapiens
ggagggtcttctacgtgagc

SEQ ID NO: 601 - DNA, 20 bp, Homo Sapiens
gagggtcttctacgtgagca

SEQ ID NO: 602 - DNA, 20 bp, Homo Sapiens
agggtcttctacgtgagcaa

SEQ ID NO: 603 - DNA, 20 bp, Homo Sapiens
gggtcttctacgtgagcaat

SEQ ID NO: 604 - DNA, 20 bp, Homo Sapiens
ggtcttctacgtgagcaatt

SEQ ID NO: 605 - DNA, 20 bp, Homo Sapiens
gtcttctacgtgagcaattg

SEQ ID NO: 606 - DNA, 20 bp, Homo Sapiens
tcttctacgtgagcaattgg

SEQ ID NO: 607 - DNA, 20 bp, Homo Sapiens
cttctacgtgagcaattgga

SEQ ID NO: 608 - DNA, 20 bp, Homo Sapiens
ttctacgtgagcaattggat

SEQ ID NO: 609 - DNA, 20 bp, Homo Sapiens
tctacgtgagcaattggatt

SEQ ID NO: 610 - DNA, 20 bp, Homo Sapiens
ctacgtgagcaattggattg

SEQ ID NO: 611 - DNA, 20 bp, Homo Sapiens
tacgtgagcaattggattgt

SEQ ID NO: 612 - DNA, 20 bp, Homo Sapiens
acgtgagcaattggattgtc

SEQ ID NO: 613 - DNA, 20 bp, Homo Sapiens
cgtgagcaattggattgtca

SEQ ID NO: 614 - DNA, 20 bp, Homo Sapiens
gtgagcaattggattgtcat

SEQ ID NO: 615 - DNA, 20 bp, Homo Sapiens
tgagcaattggattgtcatc

SEQ ID NO: 616 - DNA, 20 bp, Homo Sapiens
gagcaattggattgtcatca

SEQ ID NO: 617 - DNA, 20 bp, Homo Sapiens
agcaattggattgtcatcag

SEQ ID NO: 618 - DNA, 20 bp, Homo Sapiens
gcaattggattgtcatcagc

SEQ ID NO: 619 - DNA, 20 bp, Homo Sapiens
caattggattgtcatcagcc

SEQ ID NO: 620 - DNA, 20 bp, Homo Sapiens
aattggattgtcatcagccc

SEQ ID NO: 621 - DNA, 20 bp, Homo Sapiens
attggattgtcatcagccct

SEQ ID NO: 622 - DNA, 20 bp, Homo Sapiens
ttggattgtcatcagccctg

SEQ ID NO: 623 - DNA, 20 bp, Homo Sapiens
tggattgtcatcagccctgc

SEQ ID NO: 624 - DNA, 20 bp, Homo Sapiens
ggattgtcatcagccctgcc

SEQ ID NO: 625 - DNA, 20 bp, Homo Sapiens
gattgtcatcagccctgcct

SEQ ID NO: 626 - DNA, 20 bp, Homo Sapiens
attgtcatcagccctgcctg

SEQ ID NO: 627 - DNA, 20 bp, Homo Sapiens
ttgtcatcagccctgcctgt

SEQ ID NO: 628 - DNA, 20 bp, Homo Sapiens
tgtcatcagccctgcctgtt

SEQ ID NO: 629 - DNA, 20 bp, Homo Sapiens
gtcatcagccctgcctgttt

SEQ ID NO: 630 - DNA, 20 bp, Homo Sapiens
tcatcagccctgcctgtttt

SEQ ID NO: 631 - DNA, 20 bp, Homo Sapiens
catcagccctgcctgttttg

SEQ ID NO: 632 - DNA, 20 bp, Homo Sapiens
atcagccctgcctgttttgc

SEQ ID NO: 633 - DNA, 20 bp, Homo Sapiens
tcagccctgcctgttttgca

SEQ ID NO: 634 - DNA, 20 bp, Homo Sapiens
cagccctgcctgttttgcac

SEQ ID NO: 635 - DNA, 20 bp, Homo Sapiens
agccctgcctgttttgcacc

SEQ ID NO: 636 - DNA, 20 bp, Homo Sapiens
gccctgcctgttttgcacct

SEQ ID NO: 637 - DNA, 20 bp, Homo Sapiens
ccctgcctgttttgcacctg

SEQ ID NO: 638 - DNA, 20 bp, Homo Sapiens
cctgcctgttttgcacctgg

SEQ ID NO: 639 - DNA, 20 bp, Homo Sapiens
ctgcctgttttgcacctggg

SEQ ID NO: 640 - DNA, 20 bp, Homo Sapiens
tgcctgttttgcacctggga

SEQ ID NO: 641 - DNA, 20 bp, Homo Sapiens
gcctgttttgcacctgggaa

SEQ ID NO: 642 - DNA, 20 bp, Homo Sapiens
cctgttttgcacctgggaag

SEQ ID NO: 643 - DNA, 20 bp, Homo Sapiens
ctgttttgcacctgggaagt

SEQ ID NO: 644 - DNA, 20 bp, Homo Sapiens
tgttttgcacctgggaagtg

SEQ ID NO: 645 - DNA, 20 bp, Homo Sapiens
gttttgcacctgggaagtgc

SEQ ID NO: 646 - DNA, 20 bp, Homo Sapiens
ttttgcacctgggaagtgcc

SEQ ID NO: 647 - DNA, 20 bp, Homo Sapiens
tttgcacctgggaagtgccc

SEQ ID NO: 648 - DNA, 20 bp, Homo Sapiens
ttgcacctgggaagtgccct

SEQ ID NO: 649 - DNA, 20 bp, Homo Sapiens
tgcacctgggaagtgccctg

SEQ ID NO: 650 - DNA, 20 bp, Homo Sapiens
gcacctgggaagtgccctgg

SEQ ID NO: 651 - DNA, 20 bp, Homo Sapiens
cacctgggaagtgccctggt

SEQ ID NO: 652 - DNA, 20 bp, Homo Sapiens
acctgggaagtgccctggtc

SEQ ID NO: 653 - DNA, 20 bp, Homo Sapiens
cctgggaagtgccctggtct

SEQ ID NO: 654 - DNA, 20 bp, Homo Sapiens
ctgggaagtgccctggtctt

SEQ ID NO: 655 - DNA, 20 bp, Homo Sapiens
tgggaagtgccctggtctta

SEQ ID NO: 656 - DNA, 20 bp, Homo Sapiens
gggaagtgccctggtcttac

SEQ ID NO: 657 - DNA, 20 bp, Homo Sapiens
ggaagtgccctggtcttact

SEQ ID NO: 658 - DNA, 20 bp, Homo Sapiens
gaagtgccctggtcttactt

SEQ ID NO: 659 - DNA, 20 bp, Homo Sapiens
aagtgccctggtcttacttg

SEQ ID NO: 660 - DNA, 20 bp, Homo Sapiens
agtgccctggtcttacttgg

SEQ ID NO: 661 - DNA, 20 bp, Homo Sapiens
gtgccctggtcttacttggg

SEQ ID NO: 662 - DNA, 20 bp, Homo Sapiens
tgccctggtcttacttgggt

SEQ ID NO: 663 - DNA, 20 bp, Homo Sapiens
gccctggtcttacttgggtc

SEQ ID NO: 664 - DNA, 20 bp, Homo Sapiens
ccctggtcttacttgggtcc

SEQ ID NO: 665 - DNA, 20 bp, Homo Sapiens
cctggtcttacttgggtcca

SEQ ID NO: 666 - DNA, 20 bp, Homo Sapiens
ctggtcttacttgggtccaa

SEQ ID NO: 667 - DNA, 20 bp, Homo Sapiens
tggtcttacttgggtccaaa

SEQ ID NO: 668 - DNA, 20 bp, Homo Sapiens
ggtcttacttgggtccaaat

SEQ ID NO: 669 - DNA, 20 bp, Homo Sapiens
gtcttacttgggtccaaatt

SEQ ID NO: 670 - DNA, 20 bp, Homo Sapiens
tcttacttgggtccaaattg

SEQ ID NO: 671 - DNA, 20 bp, Homo Sapiens
cttacttgggtccaaattgt

SEQ ID NO: 672 - DNA, 20 bp, Homo Sapiens
ttacttgggtccaaattgtt

SEQ ID NO: 673 - DNA, 20 bp, Homo Sapiens
tacttgggtccaaattgttg

SEQ ID NO: 674 - DNA, 20 bp, Homo Sapiens
acttgggtccaaattgttgg

SEQ ID NO: 675 - DNA, 20 bp, Homo Sapiens
cttgggtccaaattgttggc

SEQ ID NO: 676 - DNA, 20 bp, Homo Sapiens
ttgggtccaaattgttggct

SEQ ID NO: 677 - DNA, 20 bp, Homo Sapiens
tgggtccaaattgttggctt

SEQ ID NO: 678 - DNA, 20 bp, Homo Sapiens
gggtccaaattgttggcttt

SEQ ID NO: 679 - DNA, 20 bp, Homo Sapiens
ggtccaaattgttggctttc

SEQ ID NO: 680 - DNA, 20 bp, Homo Sapiens
gtccaaattgttggctttca

SEQ ID NO: 681 - DNA, 20 bp, Homo Sapiens
tccaaattgttggctttcac

SEQ ID NO: 682 - DNA, 20 bp, Homo Sapiens
ccaaattgttggctttcact

SEQ ID NO: 683 - DNA, 20 bp, Homo Sapiens
caaattgttggctttcactt

SEQ ID NO: 684 - DNA, 20 bp, Homo Sapiens
aaattgttggctttcacttt

SEQ ID NO: 685 - DNA, 20 bp, Homo Sapiens
aattgttggctttcactttt

SEQ ID NO: 686 - DNA, 20 bp, Homo Sapiens
attgttggctttcacttttg

SEQ ID NO: 687 - DNA, 20 bp, Homo Sapiens
ttgttggctttcacttttga

SEQ ID NO: 688 - DNA, 20 bp, Homo Sapiens
tgttggctttcacttttgac

SEQ ID NO: 689 - DNA, 20 bp, Homo Sapiens
gttggctttcacttttgacc

SEQ ID NO: 690 - DNA, 20 bp, Homo Sapiens
ttggctttcacttttgaccc

SEQ ID NO: 691 - DNA, 20 bp, Homo Sapiens
tggctttcacttttgaccct

SEQ ID NO: 692 - DNA, 20 bp, Homo Sapiens
ggctttcacttttgacccta

SEQ ID NO: 693 - DNA, 20 bp, Homo Sapiens
gctttcacttttgaccctaa

SEQ ID NO: 694 - DNA, 20 bp, Homo Sapiens
ctttcacttttgaccctaag

SEQ ID NO: 695 - DNA, 20 bp, Homo Sapiens
tttcacttttgaccctaagc

SEQ ID NO: 696 - DNA, 20 bp, Homo Sapiens
ttcacttttgaccctaagca

SEQ ID NO: 697 - DNA, 20 bp, Homo Sapiens
tcacttttgaccctaagcat

SEQ ID NO: 698 - DNA, 20 bp, Homo Sapiens
cacttttgaccctaagcatc

SEQ ID NO: 699 - DNA, 20 bp, Homo Sapiens
acttttgaccctaagcatct

SEQ ID NO: 700 - DNA, 20 bp, Homo Sapiens
cttttgaccctaagcatctg

SEQ ID NO: 701 - DNA, 20 bp, Homo Sapiens
ttttgaccctaagcatctga

SEQ ID NO: 702 - DNA, 20 bp, Homo Sapiens
tttgaccctaagcatctgaa

SEQ ID NO: 703 - DNA, 20 bp, Homo Sapiens
ttgaccctaagcatctgaag

SEQ ID NO: 704 - DNA, 20 bp, Homo Sapiens
tgaccctaagcatctgaagc

SEQ ID NO: 705 - DNA, 20 bp, Homo Sapiens
gaccctaagcatctgaagcc

SEQ ID NO: 706 - DNA, 20 bp, Homo Sapiens
accctaagcatctgaagcca

SEQ ID NO: 707 - DNA, 20 bp, Homo Sapiens
ccctaagcatctgaagccat

SEQ ID NO: 708 - DNA, 20 bp, Homo Sapiens
cctaagcatctgaagccatg

SEQ ID NO: 709 - DNA, 20 bp, Homo Sapiens
ctaagcatctgaagccatgg

SEQ ID NO: 710 - DNA, 20 bp, Homo Sapiens
taagcatctgaagccatggg

SEQ ID NO: 711 - DNA, 20 bp, Homo Sapiens
aagcatctgaagccatgggc

SEQ ID NO: 712 - DNA, 20 bp, Homo Sapiens
agcatctgaagccatgggcc

SEQ ID NO: 713 - DNA, 20 bp, Homo Sapiens
gcatctgaagccatgggcca

SEQ ID NO: 714 - DNA, 20 bp, Homo Sapiens
catctgaagccatgggccac

SEQ ID NO: 715 - DNA, 20 bp, Homo Sapiens
atctgaagccatgggccaca

SEQ ID NO: 716 - DNA, 20 bp, Homo Sapiens
tctgaagccatgggccacac

SEQ ID NO: 717 - DNA, 20 bp, Homo Sapiens
ctgaagccatgggccacaca

SEQ ID NO: 718 - DNA, 20 bp, Homo Sapiens
tgaagccatgggccacacac

SEQ ID NO: 719 - DNA, 20 bp, Homo Sapiens
gaagccatgggccacacacg

SEQ ID NO: 720 - DNA, 20 bp, Homo Sapiens
aagccatgggccacacacgg

SEQ ID NO: 721 - DNA, 20 bp, Homo Sapiens
agccatgggccacacacgga

SEQ ID NO: 722 - DNA, 20 bp, Homo Sapiens
gccatgggccacacacggag

SEQ ID NO: 723 - DNA, 20 bp, Homo Sapiens
ccatgggccacacacggagg

SEQ ID NO: 724 - DNA, 20 bp, Homo Sapiens
catgggccacacacggaggc

SEQ ID NO: 725 - DNA, 20 bp, Homo Sapiens
atgggccacacacggaggca

SEQ ID NO: 726 - DNA, 20 bp, Homo Sapiens
tgggccacacacggaggcag

SEQ ID NO: 727 - DNA, 20 bp, Homo Sapiens
gggccacacacggaggcagg

SEQ ID NO: 728 - DNA, 20 bp, Homo Sapiens
ggccacacacggaggcaggg

SEQ ID NO: 729 - DNA, 20 bp, Homo Sapiens
gccacacacggaggcaggga

SEQ ID NO: 730 - DNA, 20 bp, Homo Sapiens
ccacacacggaggcagggaa

SEQ ID NO: 731 - DNA, 20 bp, Homo Sapiens
cacacacggaggcagggaac

SEQ ID NO: 732 - DNA, 20 bp, Homo Sapiens
acacacggaggcagggaaca

SEQ ID NO: 733 - DNA, 20 bp, Homo Sapiens
cacacggaggcagggaacat

SEQ ID NO: 734 - DNA, 20 bp, Homo Sapiens
acacggaggcagggaacatc

SEQ ID NO: 735 - DNA, 20 bp, Homo Sapiens
cacggaggcagggaacatca

SEQ ID NO: 736 - DNA, 20 bp, Homo Sapiens
acggaggcagggaacatcac

SEQ ID NO: 737 - DNA, 20 bp, Homo Sapiens
cggaggcagggaacatcacc

SEQ ID NO: 738 - DNA, 20 bp, Homo Sapiens
ggaggcagggaacatcacca

SEQ ID NO: 739 - DNA, 20 bp, Homo Sapiens
gaggcagggaacatcaccat

SEQ ID NO: 740 - DNA, 20 bp, Homo Sapiens
aggcagggaacatcaccatc

SEQ ID NO: 741 - DNA, 20 bp, Homo Sapiens
ggcagggaacatcaccatcc

SEQ ID NO: 742 - DNA, 20 bp, Homo Sapiens
gcagggaacatcaccatcca

SEQ ID NO: 743 - DNA, 20 bp, Homo Sapiens
cagggaacatcaccatccaa

SEQ ID NO: 744 - DNA, 20 bp, Homo Sapiens
agggaacatcaccatccaag

SEQ ID NO: 745 - DNA, 20 bp, Homo Sapiens
gggaacatcaccatccaagt

SEQ ID NO: 746 - DNA, 20 bp, Homo Sapiens
ggaacatcaccatccaagtg

SEQ ID NO: 747 - DNA, 20 bp, Homo Sapiens
gaacatcaccatccaagtgt

SEQ ID NO: 748 - DNA, 20 bp, Homo Sapiens
aacatcaccatccaagtgtc

SEQ ID NO: 749 - DNA, 20 bp, Homo Sapiens
acatcaccatccaagtgtcc

SEQ ID NO: 750 - DNA, 20 bp, Homo Sapiens
catcaccatccaagtgtcca

SEQ ID NO: 751 - DNA, 20 bp, Homo Sapiens
atcaccatccaagtgtccat

SEQ ID NO: 752 - DNA, 20 bp, Homo Sapiens
tcaccatccaagtgtccata

SEQ ID NO: 753 - DNA, 20 bp, Homo Sapiens
caccatccaagtgtccatac

SEQ ID NO: 754 - DNA, 20 bp, Homo Sapiens
accatccaagtgtccatacc

SEQ ID NO: 755 - DNA, 20 bp, Homo Sapiens
ccatccaagtgtccatacct

SEQ ID NO: 756 - DNA, 20 bp, Homo Sapiens
catccaagtgtccatacctc

SEQ ID NO: 757 - DNA, 20 bp, Homo Sapiens
atccaagtgtccatacctca

SEQ ID NO: 758 - DNA, 20 bp, Homo Sapiens
tccaagtgtccatacctcaa

SEQ ID NO: 759 - DNA, 20 bp, Homo Sapiens
ccaagtgtccatacctcaat

SEQ ID NO: 760 - DNA, 20 bp, Homo Sapiens
caagtgtccatacctcaatt

SEQ ID NO: 761 - DNA, 20 bp, Homo Sapiens
aagtgtccatacctcaattt

SEQ ID NO: 762 - DNA, 20 bp, Homo Sapiens
agtgtccatacctcaatttc

SEQ ID NO: 763 - DNA, 20 bp, Homo Sapiens
gtgtccatacctcaatttct

SEQ ID NO: 764 - DNA, 20 bp, Homo Sapiens
tgtccatacctcaatttctt

SEQ ID NO: 765 - DNA, 20 bp, Homo Sapiens
gtccatacctcaatttcttt

SEQ ID NO: 766 - DNA, 20 bp, Homo Sapiens
tccatacctcaatttctttc

SEQ ID NO: 767 - DNA, 20 bp, Homo Sapiens
ccatacctcaatttctttca

SEQ ID NO: 768 - DNA, 20 bp, Homo Sapiens
catacctcaatttctttcag

SEQ ID NO: 769 - DNA, 20 bp, Homo Sapiens
atacctcaatttctttcagc

SEQ ID NO: 770 - DNA, 20 bp, Homo Sapiens
tacctcaatttctttcagct

SEQ ID NO: 771 - DNA, 20 bp, Homo Sapiens
acctcaatttctttcagctc

SEQ ID NO: 772 - DNA, 20 bp, Homo Sapiens
cctcaatttctttcagctct

SEQ ID NO: 773 - DNA, 20 bp, Homo Sapiens
ctcaatttctttcagctctt

SEQ ID NO: 774 - DNA, 20 bp, Homo Sapiens
tcaatttctttcagctcttg

SEQ ID NO: 775 - DNA, 20 bp, Homo Sapiens
caatttctttcagctcttgg

SEQ ID NO: 776 - DNA, 20 bp, Homo Sapiens
aatttctttcagctcttggt

SEQ ID NO: 777 - DNA, 20 bp, Homo Sapiens
atttctttcagctcttggtg

SEQ ID NO: 778 - DNA, 20 bp, Homo Sapiens
tttctttcagctcttggtgc

SEQ ID NO: 779 - DNA, 20 bp, Homo Sapiens
ttctttcagctcttggtgct

SEQ ID NO: 780 - DNA, 20 bp, Homo Sapiens
tctttcagctcttggtgctg

SEQ ID NO: 781 - DNA, 20 bp, Homo Sapiens
ctttcagctcttggtgctgg

SEQ ID NO: 782 - DNA, 20 bp, Homo Sapiens
tttcagctcttggtgctggc

SEQ ID NO: 783 - DNA, 20 bp, Homo Sapiens
ttcagctcttggtgctggct

SEQ ID NO: 784 - DNA, 20 bp, Homo Sapiens
tcagctcttggtgctggctg

SEQ ID NO: 785 - DNA, 20 bp, Homo Sapiens
cagctcttggtgctggctgg

SEQ ID NO: 786 - DNA, 20 bp, Homo Sapiens
agctcttggtgctggctggt

SEQ ID NO: 787 - DNA, 20 bp, Homo Sapiens
gctcttggtgctggctggtc

SEQ ID NO: 788 - DNA, 20 bp, Homo Sapiens
ctcttggtgctggctggtct

SEQ ID NO: 789 - DNA, 20 bp, Homo Sapiens
tcttggtgctggctggtctt

SEQ ID NO: 790 - DNA, 20 bp, Homo Sapiens
cttggtgctggctggtcttt

SEQ ID NO: 791 - DNA, 20 bp, Homo Sapiens
ttggtgctggctggtctttc

SEQ ID NO: 792 - DNA, 20 bp, Homo Sapiens
tggtgctggctggtctttct

SEQ ID NO: 793 - DNA, 20 bp, Homo Sapiens
ggtgctggctggtctttctc

SEQ ID NO: 794 - DNA, 20 bp, Homo Sapiens
gtgctggctggtctttctca

SEQ ID NO: 795 - DNA, 20 bp, Homo Sapiens
tgctggctggtctttctcac

SEQ ID NO: 796 - DNA, 20 bp, Homo Sapiens
gctggctggtctttctcact

SEQ ID NO: 797 - DNA, 20 bp, Homo Sapiens
ctggctggtctttctcactt

SEQ ID NO: 798 - DNA, 20 bp, Homo Sapiens
tggctggtctttctcacttc

SEQ ID NO: 799 - DNA, 20 bp, Homo Sapiens
ggctggtctttctcacttct

SEQ ID NO: 800 - DNA, 20 bp, Homo Sapiens
gctggtctttctcacttctg

SEQ ID NO: 801 - DNA, 20 bp, Homo Sapiens
ctggtctttctcacttctgt

SEQ ID NO: 802 - DNA, 20 bp, Homo Sapiens
tggtctttctcacttctgtt

SEQ ID NO: 803 - DNA, 20 bp, Homo Sapiens
ggtctttctcacttctgttc

SEQ ID NO: 804 - DNA, 20 bp, Homo Sapiens
gtctttctcacttctgttca

SEQ ID NO: 805 - DNA, 20 bp, Homo Sapiens
tctttctcacttctgttcag

SEQ ID NO: 806 - DNA, 20 bp, Homo Sapiens
ctttctcacttctgttcagg

SEQ ID NO: 807 - DNA, 20 bp, Homo Sapiens
tttctcacttctgttcaggt

SEQ ID NO: 808 - DNA, 20 bp, Homo Sapiens
ttctcacttctgttcaggtg

SEQ ID NO: 809 - DNA, 20 bp, Homo Sapiens
tctcacttctgttcaggtgt

SEQ ID NO: 810 - DNA, 20 bp, Homo Sapiens
ctcacttctgttcaggtgtt

SEQ ID NO: 811 - DNA, 20 bp, Homo Sapiens
tcacttctgttcaggtgtta

SEQ ID NO: 812 - DNA, 20 bp, Homo Sapiens
cacttctgttcaggtgttat

SEQ ID NO: 813 - DNA, 20 bp, Homo Sapiens
acttctgttcaggtgttatc

SEQ ID NO: 814 - DNA, 20 bp, Homo Sapiens
cttctgttcaggtgttatcc

SEQ ID NO: 815 - DNA, 20 bp, Homo Sapiens
ttctgttcaggtgttatcca

SEQ ID NO: 816 - DNA, 20 bp, Homo Sapiens
tctgttcaggtgttatccac

SEQ ID NO: 817 - DNA, 20 bp, Homo Sapiens
ctgttcaggtgttatccacg

SEQ ID NO: 818 - DNA, 20 bp, Homo Sapiens
tgttcaggtgttatccacgt

SEQ ID NO: 819 - DNA, 20 bp, Homo Sapiens
gttcaggtgttatccacgtg

SEQ ID NO: 820 - DNA, 20 bp, Homo Sapiens
ttcaggtgttatccacgtga

SEQ ID NO: 821 - DNA, 20 bp, Homo Sapiens
tcaggtgttatccacgtgac

SEQ ID NO: 822 - DNA, 20 bp, Homo Sapiens
caggtgttatccacgtgacc

SEQ ID NO: 823 - DNA, 20 bp, Homo Sapiens
aggtgttatccacgtgacca

SEQ ID NO: 824 - DNA, 20 bp, Homo Sapiens
ggtgttatccacgtgaccaa

SEQ ID NO: 825 - DNA, 20 bp, Homo Sapiens
gtgttatccacgtgaccaag

SEQ ID NO: 826 - DNA, 20 bp, Homo Sapiens
tgttatccacgtgaccaagg

SEQ ID NO: 827 - DNA, 20 bp, Homo Sapiens
gttatccacgtgaccaagga

SEQ ID NO: 828 - DNA, 20 bp, Homo Sapiens
ttatccacgtgaccaaggaa

SEQ ID NO: 829 - DNA, 20 bp, Homo Sapiens
tatccacgtgaccaaggaag

SEQ ID NO: 830 - DNA, 20 bp, Homo Sapiens
atccacgtgaccaaggaagt

SEQ ID NO: 831 - DNA, 20 bp, Homo Sapiens
tccacgtgaccaaggaagtg

SEQ ID NO: 832 - DNA, 20 bp, Homo Sapiens
ccacgtgaccaaggaagtga

SEQ ID NO: 833 - DNA, 20 bp, Homo Sapiens
cacgtgaccaaggaagtgaa

SEQ ID NO: 834 - DNA, 20 bp, Homo Sapiens
acgtgaccaaggaagtgaaa

SEQ ID NO: 835 - DNA, 20 bp, Homo Sapiens
cgtgaccaaggaagtgaaag

SEQ ID NO: 836 - DNA, 20 bp, Homo Sapiens
gtgaccaaggaagtgaaaga

SEQ ID NO: 837 - DNA, 20 bp, Homo Sapiens
tgaccaaggaagtgaaagaa

SEQ ID NO: 838 - DNA, 20 bp, Homo Sapiens
gaccaaggaagtgaaagaag

SEQ ID NO: 839 - DNA, 20 bp, Homo Sapiens
accaaggaagtgaaagaagt

SEQ ID NO: 840 - DNA, 20 bp, Homo Sapiens
ccaaggaagtgaaagaagtg

SEQ ID NO: 841 - DNA, 20 bp, Homo Sapiens
caaggaagtgaaagaagtgg

SEQ ID NO: 842 - DNA, 20 bp, Homo Sapiens
aaggaagtgaaagaagtggc

SEQ ID NO: 843 - DNA, 20 bp, Homo Sapiens
aggaagtgaaagaagtggca

SEQ ID NO: 844 - DNA, 20 bp, Homo Sapiens
ggaagtgaaagaagtggcaa

SEQ ID NO: 845 - DNA, 20 bp, Homo Sapiens
gaagtgaaagaagtggcaac

SEQ ID NO: 846 - DNA, 20 bp, Homo Sapiens
aagtgaaagaagtggcaacg

SEQ ID NO: 847 - DNA, 20 bp, Homo Sapiens
agtgaaagaagtggcaacgc

SEQ ID NO: 848 - DNA, 20 bp, Homo Sapiens
gtgaaagaagtggcaacgct

SEQ ID NO: 849 - DNA, 20 bp, Homo Sapiens
tgaaagaagtggcaacgctg

SEQ ID NO: 850 - DNA, 20 bp, Homo Sapiens
gaaagaagtggcaacgctgt

SEQ ID NO: 851 - DNA, 20 bp, Homo Sapiens
aaagaagtggcaacgctgtc

SEQ ID NO: 852 - DNA, 20 bp, Homo Sapiens
aagaagtggcaacgctgtcc

SEQ ID NO: 853 - DNA, 20 bp, Homo Sapiens
agaagtggcaacgctgtcct

SEQ ID NO: 854 - DNA, 20 bp, Homo Sapiens
gaagtggcaacgctgtcctg

SEQ ID NO: 855 - DNA, 20 bp, Homo Sapiens
aagtggcaacgctgtcctgt

SEQ ID NO: 856 - DNA, 20 bp, Homo Sapiens
agtggcaacgctgtcctgtg

SEQ ID NO: 857 - DNA, 20 bp, Homo Sapiens
gtggcaacgctgtcctgtgg

SEQ ID NO: 858 - DNA, 20 bp, Homo Sapiens
tggcaacgctgtcctgtggt

SEQ ID NO: 859 - DNA, 20 bp, Homo Sapiens
ggcaacgctgtcctgtggtc

SEQ ID NO: 860 - DNA, 20 bp, Homo Sapiens
gcaacgctgtcctgtggtca

SEQ ID NO: 861 - DNA, 20 bp, Homo Sapiens
caacgctgtcctgtggtcac

SEQ ID NO: 862 - DNA, 20 bp, Homo Sapiens
aacgctgtcctgtggtcaca

SEQ ID NO: 863 - DNA, 20 bp, Homo Sapiens
acgctgtcctgtggtcacaa

SEQ ID NO: 864 - DNA, 20 bp, Homo Sapiens
cgctgtcctgtggtcacaat

SEQ ID NO: 865 - DNA, 20 bp, Homo Sapiens
gctgtcctgtggtcacaatg

SEQ ID NO: 866 - DNA, 20 bp, Homo Sapiens
ctgtcctgtggtcacaatgt

SEQ ID NO: 867 - DNA, 20 bp, Homo Sapiens
tgtcctgtggtcacaatgtt

SEQ ID NO: 868 - DNA, 20 bp, Homo Sapiens
gtcctgtggtcacaatgttt

SEQ ID NO: 869 - DNA, 20 bp, Homo Sapiens
tcctgtggtcacaatgtttc

SEQ ID NO: 870 - DNA, 20 bp, Homo Sapiens
cctgtggtcacaatgtttct

SEQ ID NO: 871 - DNA, 20 bp, Homo Sapiens
ctgtggtcacaatgtttctg

SEQ ID NO: 872 - DNA, 20 bp, Homo Sapiens
tgtggtcacaatgtttctgt

SEQ ID NO: 873 - DNA, 20 bp, Homo Sapiens
gtggtcacaatgtttctgtt

SEQ ID NO: 874 - DNA, 20 bp, Homo Sapiens
tggtcacaatgtttctgttg

SEQ ID NO: 875 - DNA, 20 bp, Homo Sapiens
ggtcacaatgtttctgttga

SEQ ID NO: 876 - DNA, 20 bp, Homo Sapiens
gtcacaatgtttctgttgaa

SEQ ID NO: 877 - DNA, 20 bp, Homo Sapiens
tcacaatgtttctgttgaag

SEQ ID NO: 878 - DNA, 20 bp, Homo Sapiens
cacaatgtttctgttgaaga

SEQ ID NO: 879 - DNA, 20 bp, Homo Sapiens
acaatgtttctgttgaagag

SEQ ID NO: 880 - DNA, 20 bp, Homo Sapiens
caatgtttctgttgaagagc

SEQ ID NO: 881 - DNA, 20 bp, Homo Sapiens
aatgtttctgttgaagagct

SEQ ID NO: 882 - DNA, 20 bp, Homo Sapiens
atgtttctgttgaagagctg

SEQ ID NO: 883 - DNA, 20 bp, Homo Sapiens
tgtttctgttgaagagctgg

SEQ ID NO: 884 - DNA, 20 bp, Homo Sapiens
gtttctgttgaagagctggc

SEQ ID NO: 885 - DNA, 20 bp, Homo Sapiens
tttctgttgaagagctggca

SEQ ID NO: 886 - DNA, 20 bp, Homo Sapiens
ttctgttgaagagctggcac

SEQ ID NO: 887 - DNA, 20 bp, Homo Sapiens
tctgttgaagagctggcaca

SEQ ID NO: 888 - DNA, 20 bp, Homo Sapiens
ctgttgaagagctggcacaa

SEQ ID NO: 889 - DNA, 20 bp, Homo Sapiens
tgttgaagagctggcacaaa

SEQ ID NO: 890 - DNA, 20 bp, Homo Sapiens
gttgaagagctggcacaaac

SEQ ID NO: 891 - DNA, 20 bp, Homo Sapiens
ttgaagagctggcacaaact

SEQ ID NO: 892 - DNA, 20 bp, Homo Sapiens
tgaagagctggcacaaactc

SEQ ID NO: 893 - DNA, 20 bp, Homo Sapiens
gaagagctggcacaaactcg

SEQ ID NO: 894 - DNA, 20 bp, Homo Sapiens
aagagctggcacaaactcgc

SEQ ID NO: 895 - DNA, 20 bp, Homo Sapiens
agagctggcacaaactcgca

SEQ ID NO: 896 - DNA, 20 bp, Homo Sapiens
gagctggcacaaactcgcat

SEQ ID NO: 897 - DNA, 20 bp, Homo Sapiens
agctggcacaaactcgcatc

SEQ ID NO: 898 - DNA, 20 bp, Homo Sapiens
gctggcacaaactcgcatct

SEQ ID NO: 899 - DNA, 20 bp, Homo Sapiens
ctggcacaaactcgcatcta

SEQ ID NO: 900 - DNA, 20 bp, Homo Sapiens
tggcacaaactcgcatctac

SEQ ID NO: 901 - DNA, 20 bp, Homo Sapiens
ggcacaaactcgcatctact

SEQ ID NO: 902 - DNA, 20 bp, Homo Sapiens
gcacaaactcgcatctactg

SEQ ID NO: 903 - DNA, 20 bp, Homo Sapiens
cacaaactcgcatctactgg

SEQ ID NO: 904 - DNA, 20 bp, Homo Sapiens
acaaactcgcatctactggc

SEQ ID NO: 905 - DNA, 20 bp, Homo Sapiens
caaactcgcatctactggca

SEQ ID NO: 906 - DNA, 20 bp, Homo Sapiens
aaactcgcatctactggcaa

SEQ ID NO: 907 - DNA, 20 bp, Homo Sapiens
aactcgcatctactggcaaa

SEQ ID NO: 908 - DNA, 20 bp, Homo Sapiens
actcgcatctactggcaaaa

SEQ ID NO: 909 - DNA, 20 bp, Homo Sapiens
ctcgcatctactggcaaaag

SEQ ID NO: 910 - DNA, 20 bp, Homo Sapiens
tcgcatctactggcaaaagg

SEQ ID NO: 911 - DNA, 20 bp, Homo Sapiens
cgcatctactggcaaaagga

SEQ ID NO: 912 - DNA, 20 bp, Homo Sapiens
gcatctactggcaaaaggag

SEQ ID NO: 913 - DNA, 20 bp, Homo Sapiens
catctactggcaaaaggaga

SEQ ID NO: 914 - DNA, 20 bp, Homo Sapiens
atctactggcaaaaggagaa

SEQ ID NO: 915 - DNA, 20 bp, Homo Sapiens
tctactggcaaaaggagaag

SEQ ID NO: 916 - DNA, 20 bp, Homo Sapiens
ctactggcaaaaggagaaga

SEQ ID NO: 917 - DNA, 20 bp, Homo Sapiens
tactggcaaaaggagaagaa

SEQ ID NO: 918 - DNA, 20 bp, Homo Sapiens
actggcaaaaggagaagaaa

SEQ ID NO: 919 - DNA, 20 bp, Homo Sapiens
ctggcaaaaggagaagaaaa

SEQ ID NO: 920 - DNA, 20 bp, Homo Sapiens
tggcaaaaggagaagaaaat

SEQ ID NO: 921 - DNA, 20 bp, Homo Sapiens
ggcaaaaggagaagaaaatg

SEQ ID NO: 922 - DNA, 20 bp, Homo Sapiens
gcaaaaggagaagaaaatgg

SEQ ID NO: 923 - DNA, 20 bp, Homo Sapiens
caaaaggagaagaaaatggt

SEQ ID NO: 924 - DNA, 20 bp, Homo Sapiens
aaaaggagaagaaaatggtg

SEQ ID NO: 925 - DNA, 20 bp, Homo Sapiens
aaaggagaagaaaatggtgc

SEQ ID NO: 926 - DNA, 20 bp, Homo Sapiens
aaggagaagaaaatggtgct

SEQ ID NO: 927 - DNA, 20 bp, Homo Sapiens
aggagaagaaaatggtgctg

SEQ ID NO: 928 - DNA, 20 bp, Homo Sapiens
ggagaagaaaatggtgctga

SEQ ID NO: 929 - DNA, 20 bp, Homo Sapiens
gagaagaaaatggtgctgac

SEQ ID NO: 930 - DNA, 20 bp, Homo Sapiens
agaagaaaatggtgctgact

SEQ ID NO: 931 - DNA, 20 bp, Homo Sapiens
gaagaaaatggtgctgacta

SEQ ID NO: 932 - DNA, 20 bp, Homo Sapiens
aagaaaatggtgctgactat

SEQ ID NO: 933 - DNA, 20 bp, Homo Sapiens
agaaaatggtgctgactatg

SEQ ID NO: 934 - DNA, 20 bp, Homo Sapiens
gaaaatggtgctgactatga

SEQ ID NO: 935 - DNA, 20 bp, Homo Sapiens
aaaatggtgctgactatgat

SEQ ID NO: 936 - DNA, 20 bp, Homo Sapiens
aaatggtgctgactatgatg

SEQ ID NO: 937 - DNA, 20 bp, Homo Sapiens
aatggtgctgactatgatgt

SEQ ID NO: 938 - DNA, 20 bp, Homo Sapiens
atggtgctgactatgatgtc

SEQ ID NO: 939 - DNA, 20 bp, Homo Sapiens
tggtgctgactatgatgtct

SEQ ID NO: 940 - DNA, 20 bp, Homo Sapiens
ggtgctgactatgatgtctg

SEQ ID NO: 941 - DNA, 20 bp, Homo Sapiens
gtgctgactatgatgtctgg

SEQ ID NO: 942 - DNA, 20 bp, Homo Sapiens
tgctgactatgatgtctggg

SEQ ID NO: 943 - DNA, 20 bp, Homo Sapiens
gctgactatgatgtctgggg

SEQ ID NO: 944 - DNA, 20 bp, Homo Sapiens
ctgactatgatgtctgggga

SEQ ID NO: 945 - DNA, 20 bp, Homo Sapiens
tgactatgatgtctggggac

SEQ ID NO: 946 - DNA, 20 bp, Homo Sapiens
gactatgatgtctggggaca

SEQ ID NO: 947 - DNA, 20 bp, Homo Sapiens
actatgatgtctggggacat

SEQ ID NO: 948 - DNA, 20 bp, Homo Sapiens
ctatgatgtctggggacatg

SEQ ID NO: 949 - DNA, 20 bp, Homo Sapiens
tatgatgtctggggacatga

SEQ ID NO: 950 - DNA, 20 bp, Homo Sapiens
atgatgtctggggacatgaa

SEQ ID NO: 951 - DNA, 20 bp, Homo Sapiens
tgatgtctggggacatgaat

SEQ ID NO: 952 - DNA, 20 bp, Homo Sapiens
gatgtctggggacatgaata

SEQ ID NO: 953 - DNA, 20 bp, Homo Sapiens
atgtctggggacatgaatat

SEQ ID NO: 954 - DNA, 20 bp, Homo Sapiens
tgtctggggacatgaatata

SEQ ID NO: 955 - DNA, 20 bp, Homo Sapiens
gtctggggacatgaatatat

SEQ ID NO: 956 - DNA, 20 bp, Homo Sapiens
tctggggacatgaatatatg

SEQ ID NO: 957 - DNA, 20 bp, Homo Sapiens
ctggggacatgaatatatgg

SEQ ID NO: 958 - DNA, 20 bp, Homo Sapiens
tggggacatgaatatatggc

SEQ ID NO: 959 - DNA, 20 bp, Homo Sapiens
ggggacatgaatatatggcc

SEQ ID NO: 960 - DNA, 20 bp, Homo Sapiens
gggacatgaatatatggccc

SEQ ID NO: 961 - DNA, 20 bp, Homo Sapiens
ggacatgaatatatggcccg

SEQ ID NO: 962 - DNA, 20 bp, Homo Sapiens
gacatgaatatatggcccga

SEQ ID NO: 963 - DNA, 20 bp, Homo Sapiens
acatgaatatatggcccgag

SEQ ID NO: 964 - DNA, 20 bp, Homo Sapiens
catgaatatatggcccgagt

SEQ ID NO: 965 - DNA, 20 bp, Homo Sapiens
atgaatatatggcccgagta

SEQ ID NO: 966 - DNA, 20 bp, Homo Sapiens
tgaatatatggcccgagtac

SEQ ID NO: 967 - DNA, 20 bp, Homo Sapiens
gaatatatggcccgagtaca

SEQ ID NO: 968 - DNA, 20 bp, Homo Sapiens
aatatatggcccgagtacaa

SEQ ID NO: 969 - DNA, 20 bp, Homo Sapiens
atatatggcccgagtacaag

SEQ ID NO: 970 - DNA, 20 bp, Homo Sapiens
tatatggcccgagtacaaga

SEQ ID NO: 971 - DNA, 20 bp, Homo Sapiens
atatggcccgagtacaagaa

SEQ ID NO: 972 - DNA, 20 bp, Homo Sapiens
tatggcccgagtacaagaac

SEQ ID NO: 973 - DNA, 20 bp, Homo Sapiens
atggcccgagtacaagaacc

SEQ ID NO: 974 - DNA, 20 bp, Homo Sapiens
tggcccgagtacaagaaccg

SEQ ID NO: 975 - DNA, 20 bp, Homo Sapiens
ggcccgagtacaagaaccgg

SEQ ID NO: 976 - DNA, 20 bp, Homo Sapiens
gcccgagtacaagaaccgga

SEQ ID NO: 977 - DNA, 20 bp, Homo Sapiens
cccgagtacaagaaccggac

SEQ ID NO: 978 - DNA, 20 bp, Homo Sapiens
ccgagtacaagaaccggacc

SEQ ID NO: 979 - DNA, 20 bp, Homo Sapiens
cgagtacaagaaccggacca

SEQ ID NO: 980 - DNA, 20 bp, Homo Sapiens
gagtacaagaaccggaccat

SEQ ID NO: 981 - DNA, 20 bp, Homo Sapiens
agtacaagaaccggaccatc

SEQ ID NO: 982 - DNA, 20 bp, Homo Sapiens
gtacaagaaccggaccatct

SEQ ID NO: 983 - DNA, 20 bp, Homo Sapiens
tacaagaaccggaccatctt

SEQ ID NO: 984 - DNA, 20 bp, Homo Sapiens
acaagaaccggaccatcttt

SEQ ID NO: 985 - DNA, 20 bp, Homo Sapiens
caagaaccggaccatctttg

SEQ ID NO: 986 - DNA, 20 bp, Homo Sapiens
aagaaccggaccatctttga

SEQ ID NO: 987 - DNA, 20 bp, Homo Sapiens
agaaccggaccatctttgat

SEQ ID NO: 988 - DNA, 20 bp, Homo Sapiens
gaaccggaccatctttgata

SEQ ID NO: 989 - DNA, 20 bp, Homo Sapiens
aaccggaccatctttgatat

SEQ ID NO: 990 - DNA, 20 bp, Homo Sapiens
accggaccatctttgatatc

SEQ ID NO: 991 - DNA, 20 bp, Homo Sapiens
ccggaccatctttgatatca

SEQ ID NO: 992 - DNA, 20 bp, Homo Sapiens
cggaccatctttgatatcac

SEQ ID NO: 993 - DNA, 20 bp, Homo Sapiens
ggaccatctttgatatcact

SEQ ID NO: 994 - DNA, 20 bp, Homo Sapiens
gaccatctttgatatcacta

SEQ ID NO: 995 - DNA, 20 bp, Homo Sapiens
accatctttgatatcactaa

SEQ ID NO: 996 - DNA, 20 bp, Homo Sapiens
ccatctttgatatcactaat

SEQ ID NO: 997 - DNA, 20 bp, Homo Sapiens
catctttgatatcactaata

SEQ ID NO: 998 - DNA, 20 bp, Homo Sapiens
atctttgatatcactaataa

SEQ ID NO: 999 - DNA, 20 bp, Homo Sapiens
tctttgatatcactaataac

SEQ ID NO: 1000 - DNA, 20 bp, Homo Sapiens
ctttgatatcactaataacc

SEQ ID NO: 1001 - DNA, 20 bp, Homo Sapiens
tttgatatcactaataacct

SEQ ID NO: 1002 - DNA, 20 bp, Homo Sapiens
ttgatatcactaataacctc

SEQ ID NO: 1003 - DNA, 20 bp, Homo Sapiens
tgatatcactaataacctct

SEQ ID NO: 1004 - DNA, 20 bp, Homo Sapiens
gatatcactaataacctctc

SEQ ID NO: 1005 - DNA, 20 bp, Homo Sapiens
atatcactaataacctctcc

SEQ ID NO: 1006 - DNA, 20 bp, Homo Sapiens
tatcactaataacctctcca

SEQ ID NO: 1007 - DNA, 20 bp, Homo Sapiens
atcactaataacctctccat

SEQ ID NO: 1008 - DNA, 20 bp, Homo Sapiens
tcactaataacctctccatt

SEQ ID NO: 1009 - DNA, 20 bp, Homo Sapiens
cactaataacctctccattg

SEQ ID NO: 1010 - DNA, 20 bp, Homo Sapiens
actaataacctctccattgt

SEQ ID NO: 1011 - DNA, 20 bp, Homo Sapiens
ctaataacctctccattgtg

SEQ ID NO: 1012 - DNA, 20 bp, Homo Sapiens
taataacctctccattgtga

SEQ ID NO: 1013 - DNA, 20 bp, Homo Sapiens
aataacctctccattgtgat

SEQ ID NO: 1014 - DNA, 20 bp, Homo Sapiens
ataacctctccattgtgatc

SEQ ID NO: 1015 - DNA, 20 bp, Homo Sapiens
taacctctccattgtgatcc

SEQ ID NO: 1016 - DNA, 20 bp, Homo Sapiens
aacctctccattgtgatcct

SEQ ID NO: 1017 - DNA, 20 bp, Homo Sapiens
acctctccattgtgatcctg

SEQ ID NO: 1018 - DNA, 20 bp, Homo Sapiens
cctctccattgtgatcctgg

SEQ ID NO: 1019 - DNA, 20 bp, Homo Sapiens
ctctccattgtgatcctggc

SEQ ID NO: 1020 - DNA, 20 bp, Homo Sapiens
tctccattgtgatcctggct

SEQ ID NO: 1021 - DNA, 20 bp, Homo Sapiens
ctccattgtgatcctggctc

SEQ ID NO: 1022 - DNA, 20 bp, Homo Sapiens
tccattgtgatcctggctct

SEQ ID NO: 1023 - DNA, 20 bp, Homo Sapiens
ccattgtgatcctggctctg

SEQ ID NO: 1024 - DNA, 20 bp, Homo Sapiens
cattgtgatcctggctctgc

SEQ ID NO: 1025 - DNA, 20 bp, Homo Sapiens
attgtgatcctggctctgcg

SEQ ID NO: 1026 - DNA, 20 bp, Homo Sapiens
ttgtgatcctggctctgcgc

SEQ ID NO: 1027 - DNA, 20 bp, Homo Sapiens
tgtgatcctggctctgcgcc

SEQ ID NO: 1028 - DNA, 20 bp, Homo Sapiens
gtgatcctggctctgcgccc

SEQ ID NO: 1029 - DNA, 20 bp, Homo Sapiens
tgatcctggctctgcgccca

SEQ ID NO: 1030 - DNA, 20 bp, Homo Sapiens
gatcctggctctgcgcccat

SEQ ID NO: 1031 - DNA, 20 bp, Homo Sapiens
atcctggctctgcgcccatc

SEQ ID NO: 1032 - DNA, 20 bp, Homo Sapiens
tcctggctctgcgcccatct

SEQ ID NO: 1033 - DNA, 20 bp, Homo Sapiens
cctggctctgcgcccatctg

SEQ ID NO: 1034 - DNA, 20 bp, Homo Sapiens
ctggctctgcgcccatctga

SEQ ID NO: 1035 - DNA, 20 bp, Homo Sapiens
tggctctgcgcccatctgac

SEQ ID NO: 1036 - DNA, 20 bp, Homo Sapiens
ggctctgcgcccatctgacg

SEQ ID NO: 1037 - DNA, 20 bp, Homo Sapiens
gctctgcgcccatctgacga

SEQ ID NO: 1038 - DNA, 20 bp, Homo Sapiens
ctctgcgcccatctgacgag

SEQ ID NO: 1039 - DNA, 20 bp, Homo Sapiens
tctgcgcccatctgacgagg

SEQ ID NO: 1040 - DNA, 20 bp, Homo Sapiens
ctgcgcccatctgacgaggg

SEQ ID NO: 1041 - DNA, 20 bp, Homo Sapiens
tgcgcccatctgacgagggc

SEQ ID NO: 1042 - DNA, 20 bp, Homo Sapiens
gcgcccatctgacgagggca

SEQ ID NO: 1043 - DNA, 20 bp, Homo Sapiens
cgcccatctgacgagggcac

SEQ ID NO: 1044 - DNA, 20 bp, Homo Sapiens
gcccatctgacgagggcaca

SEQ ID NO: 1045 - DNA, 20 bp, Homo Sapiens
cccatctgacgagggcacat

SEQ ID NO: 1046 - DNA, 20 bp, Homo Sapiens
ccatctgacgagggcacata

SEQ ID NO: 1047 - DNA, 20 bp, Homo Sapiens
catctgacgagggcacatac

SEQ ID NO: 1048 - DNA, 20 bp, Homo Sapiens
atctgacgagggcacatacg

SEQ ID NO: 1049 - DNA, 20 bp, Homo Sapiens
tctgacgagggcacatacga

SEQ ID NO: 1050 - DNA, 20 bp, Homo Sapiens
ctgacgagggcacatacgag

SEQ ID NO: 1051 - DNA, 20 bp, Homo Sapiens
tgacgagggcacatacgagt

SEQ ID NO: 1052 - DNA, 20 bp, Homo Sapiens
gacgagggcacatacgagtg

SEQ ID NO: 1053 - DNA, 20 bp, Homo Sapiens
acgagggcacatacgagtgt

SEQ ID NO: 1054 - DNA, 20 bp, Homo Sapiens
cgagggcacatacgagtgtg

SEQ ID NO: 1055 - DNA, 20 bp, Homo Sapiens
gagggcacatacgagtgtgt

SEQ ID NO: 1056 - DNA, 20 bp, Homo Sapiens
agggcacatacgagtgtgtt

SEQ ID NO: 1057 - DNA, 20 bp, Homo Sapiens
gggcacatacgagtgtgttg

SEQ ID NO: 1058 - DNA, 20 bp, Homo Sapiens
ggcacatacgagtgtgttgt

SEQ ID NO: 1059 - DNA, 20 bp, Homo Sapiens
gcacatacgagtgtgttgtt

SEQ ID NO: 1060 - DNA, 20 bp, Homo Sapiens
cacatacgagtgtgttgttc

SEQ ID NO: 1061 - DNA, 20 bp, Homo Sapiens
acatacgagtgtgttgttct

SEQ ID NO: 1062 - DNA, 20 bp, Homo Sapiens
catacgagtgtgttgttctg

SEQ ID NO: 1063 - DNA, 20 bp, Homo Sapiens
atacgagtgtgttgttctga

SEQ ID NO: 1064 - DNA, 20 bp, Homo Sapiens
tacgagtgtgttgttctgaa

SEQ ID NO: 1065 - DNA, 20 bp, Homo Sapiens
acgagtgtgttgttctgaag

SEQ ID NO: 1066 - DNA, 20 bp, Homo Sapiens
cgagtgtgttgttctgaagt

SEQ ID NO: 1067 - DNA, 20 bp, Homo Sapiens
gagtgtgttgttctgaagta

SEQ ID NO: 1068 - DNA, 20 bp, Homo Sapiens
agtgtgttgttctgaagtat

SEQ ID NO: 1069 - DNA, 20 bp, Homo Sapiens
gtgtgttgttctgaagtatg

SEQ ID NO: 1070 - DNA, 20 bp, Homo Sapiens
tgtgttgttctgaagtatga

SEQ ID NO: 1071 - DNA, 20 bp, Homo Sapiens
gtgttgttctgaagtatgaa

SEQ ID NO: 1072 - DNA, 20 bp, Homo Sapiens
tgttgttctgaagtatgaaa

SEQ ID NO: 1073 - DNA, 20 bp, Homo Sapiens
gttgttctgaagtatgaaaa

SEQ ID NO: 1074 - DNA, 20 bp, Homo Sapiens
ttgttctgaagtatgaaaaa

SEQ ID NO: 1075 - DNA, 20 bp, Homo Sapiens
tgttctgaagtatgaaaaag

SEQ ID NO: 1076 - DNA, 20 bp, Homo Sapiens
gttctgaagtatgaaaaaga

SEQ ID NO: 1077 - DNA, 20 bp, Homo Sapiens
ttctgaagtatgaaaaagac

SEQ ID NO: 1078 - DNA, 20 bp, Homo Sapiens
tctgaagtatgaaaaagacg

SEQ ID NO: 1079 - DNA, 20 bp, Homo Sapiens
ctgaagtatgaaaaagacgc

SEQ ID NO: 1080 - DNA, 20 bp, Homo Sapiens
tgaagtatgaaaaagacgct

SEQ ID NO: 1081 - DNA, 20 bp, Homo Sapiens
gaagtatgaaaaagacgctt

SEQ ID NO: 1082 - DNA, 20 bp, Homo Sapiens
aagtatgaaaaagacgcttt

SEQ ID NO: 1083 - DNA, 20 bp, Homo Sapiens
agtatgaaaaagacgctttc

SEQ ID NO: 1084 - DNA, 20 bp, Homo Sapiens
gtatgaaaaagacgctttca

SEQ ID NO: 1085 - DNA, 20 bp, Homo Sapiens
tatgaaaaagacgctttcaa

SEQ ID NO: 1086 - DNA, 20 bp, Homo Sapiens
atgaaaaagacgctttcaag

SEQ ID NO: 1087 - DNA, 20 bp, Homo Sapiens
tgaaaaagacgctttcaagc

SEQ ID NO: 1088 - DNA, 20 bp, Homo Sapiens
gaaaaagacgctttcaagcg

SEQ ID NO: 1089 - DNA, 20 bp, Homo Sapiens
aaaaagacgctttcaagcgg

SEQ ID NO: 1090 - DNA, 20 bp, Homo Sapiens
aaaagacgctttcaagcggg

SEQ ID NO: 1091 - DNA, 20 bp, Homo Sapiens
aaagacgctttcaagcggga

SEQ ID NO: 1092 - DNA, 20 bp, Homo Sapiens
aagacgctttcaagcgggaa

SEQ ID NO: 1093 - DNA, 20 bp, Homo Sapiens
agacgctttcaagcgggaac

SEQ ID NO: 1094 - DNA, 20 bp, Homo Sapiens
gacgctttcaagcgggaaca

SEQ ID NO: 1095 - DNA, 20 bp, Homo Sapiens
acgctttcaagcgggaacac

SEQ ID NO: 1096 - DNA, 20 bp, Homo Sapiens
cgctttcaagcgggaacacc

SEQ ID NO: 1097 - DNA, 20 bp, Homo Sapiens
gctttcaagcgggaacacct

SEQ ID NO: 1098 - DNA, 20 bp, Homo Sapiens
ctttcaagcgggaacacctg

SEQ ID NO: 1099 - DNA, 20 bp, Homo Sapiens
tttcaagcgggaacacctgg

SEQ ID NO: 1100 - DNA, 20 bp, Homo Sapiens
ttcaagcgggaacacctggc

SEQ ID NO: 1101 - DNA, 20 bp, Homo Sapiens
tcaagcgggaacacctggct

SEQ ID NO: 1102 - DNA, 20 bp, Homo Sapiens
caagcgggaacacctggctg

SEQ ID NO: 1103 - DNA, 20 bp, Homo Sapiens
aagcgggaacacctggctga

SEQ ID NO: 1104 - DNA, 20 bp, Homo Sapiens
agcgggaacacctggctgaa

SEQ ID NO: 1105 - DNA, 20 bp, Homo Sapiens
gcgggaacacctggctgaag

SEQ ID NO: 1106 - DNA, 20 bp, Homo Sapiens
cgggaacacctggctgaagt

SEQ ID NO: 1107 - DNA, 20 bp, Homo Sapiens
gggaacacctggctgaagtg

SEQ ID NO: 1108 - DNA, 20 bp, Homo Sapiens
ggaacacctggctgaagtga

SEQ ID NO: 1109 - DNA, 20 bp, Homo Sapiens
gaacacctggctgaagtgac

SEQ ID NO: 1110 - DNA, 20 bp, Homo Sapiens
aacacctggctgaagtgacg

SEQ ID NO: 1111 - DNA, 20 bp, Homo Sapiens
acacctggctgaagtgacgt

SEQ ID NO: 1112 - DNA, 20 bp, Homo Sapiens
cacctggctgaagtgacgtt

SEQ ID NO: 1113 - DNA, 20 bp, Homo Sapiens
acctggctgaagtgacgtta

SEQ ID NO: 1114 - DNA, 20 bp, Homo Sapiens
cctggctgaagtgacgttat

SEQ ID NO: 1115 - DNA, 20 bp, Homo Sapiens
ctggctgaagtgacgttatc

SEQ ID NO: 1116 - DNA, 20 bp, Homo Sapiens
tggctgaagtgacgttatca

SEQ ID NO: 1117 - DNA, 20 bp, Homo Sapiens
ggctgaagtgacgttatcag

SEQ ID NO: 1118 - DNA, 20 bp, Homo Sapiens
gctgaagtgacgttatcagt

SEQ ID NO: 1119 - DNA, 20 bp, Homo Sapiens
ctgaagtgacgttatcagtc

SEQ ID NO: 1120 - DNA, 20 bp, Homo Sapiens
tgaagtgacgttatcagtca

SEQ ID NO: 1121 - DNA, 20 bp, Homo Sapiens
gaagtgacgttatcagtcaa

SEQ ID NO: 1122 - DNA, 20 bp, Homo Sapiens
aagtgacgttatcagtcaaa

SEQ ID NO: 1123 - DNA, 20 bp, Homo Sapiens
agtgacgttatcagtcaaag

SEQ ID NO: 1124 - DNA, 20 bp, Homo Sapiens
gtgacgttatcagtcaaagc

SEQ ID NO: 1125 - DNA, 20 bp, Homo Sapiens
tgacgttatcagtcaaagct

SEQ ID NO: 1126 - DNA, 20 bp, Homo Sapiens
gacgttatcagtcaaagctg

SEQ ID NO: 1127 - DNA, 20 bp, Homo Sapiens
acgttatcagtcaaagctga

SEQ ID NO: 1128 - DNA, 20 bp, Homo Sapiens
cgttatcagtcaaagctgac

SEQ ID NO: 1129 - DNA, 20 bp, Homo Sapiens
gttatcagtcaaagctgact

SEQ ID NO: 1130 - DNA, 20 bp, Homo Sapiens
ttatcagtcaaagctgactt

SEQ ID NO: 1131 - DNA, 20 bp, Homo Sapiens
tatcagtcaaagctgacttc

SEQ ID NO: 1132 - DNA, 20 bp, Homo Sapiens
atcagtcaaagctgacttcc

SEQ ID NO: 1133 - DNA, 20 bp, Homo Sapiens
tcagtcaaagctgacttccc

SEQ ID NO: 1134 - DNA, 20 bp, Homo Sapiens
cagtcaaagctgacttccct

SEQ ID NO: 1135 - DNA, 20 bp, Homo Sapiens
agtcaaagctgacttcccta

SEQ ID NO: 1136 - DNA, 20 bp, Homo Sapiens
gtcaaagctgacttccctac

SEQ ID NO: 1137 - DNA, 20 bp, Homo Sapiens
tcaaagctgacttccctaca

SEQ ID NO: 1138 - DNA, 20 bp, Homo Sapiens
caaagctgacttccctacac

SEQ ID NO: 1139 - DNA, 20 bp, Homo Sapiens
aaagctgacttccctacacc

SEQ ID NO: 1140 - DNA, 20 bp, Homo Sapiens
aagctgacttccctacacct

SEQ ID NO: 1141 - DNA, 20 bp, Homo Sapiens
agctgacttccctacaccta

SEQ ID NO: 1142 - DNA, 20 bp, Homo Sapiens
gctgacttccctacacctag

SEQ ID NO: 1143 - DNA, 20 bp, Homo Sapiens
ctgacttccctacacctagt

SEQ ID NO: 1144 - DNA, 20 bp, Homo Sapiens
tgacttccctacacctagta

SEQ ID NO: 1145 - DNA, 20 bp, Homo Sapiens
gacttccctacacctagtat

SEQ ID NO: 1146 - DNA, 20 bp, Homo Sapiens
acttccctacacctagtata

SEQ ID NO: 1147 - DNA, 20 bp, Homo Sapiens
cttccctacacctagtatat

SEQ ID NO: 1148 - DNA, 20 bp, Homo Sapiens
ttccctacacctagtatatc

SEQ ID NO: 1149 - DNA, 20 bp, Homo Sapiens
tccctacacctagtatatct

SEQ ID NO: 1150 - DNA, 20 bp, Homo Sapiens
ccctacacctagtatatctg

SEQ ID NO: 1151 - DNA, 20 bp, Homo Sapiens
cctacacctagtatatctga

SEQ ID NO: 1152 - DNA, 20 bp, Homo Sapiens
ctacacctagtatatctgac

SEQ ID NO: 1153 - DNA, 20 bp, Homo Sapiens
tacacctagtatatctgact

SEQ ID NO: 1154 - DNA, 20 bp, Homo Sapiens
acacctagtatatctgactt

SEQ ID NO: 1155 - DNA, 20 bp, Homo Sapiens
cacctagtatatctgacttt

SEQ ID NO: 1156 - DNA, 20 bp, Homo Sapiens
acctagtatatctgactttg

SEQ ID NO: 1157 - DNA, 20 bp, Homo Sapiens
cctagtatatctgactttga

SEQ ID NO: 1158 - DNA, 20 bp, Homo Sapiens
ctagtatatctgactttgaa

SEQ ID NO: 1159 - DNA, 20 bp, Homo Sapiens
tagtatatctgactttgaaa

SEQ ID NO: 1160 - DNA, 20 bp, Homo Sapiens
agtatatctgactttgaaat

SEQ ID NO: 1161 - DNA, 20 bp, Homo Sapiens
gtatatctgactttgaaatt

SEQ ID NO: 1162 - DNA, 20 bp, Homo Sapiens
tatatctgactttgaaattc

SEQ ID NO: 1163 - DNA, 20 bp, Homo Sapiens
atatctgactttgaaattcc

SEQ ID NO: 1164 - DNA, 20 bp, Homo Sapiens
tatctgactttgaaattcca

SEQ ID NO: 1165 - DNA, 20 bp, Homo Sapiens
atctgactttgaaattccaa

SEQ ID NO: 1166 - DNA, 20 bp, Homo Sapiens
tctgactttgaaattccaac

SEQ ID NO: 1167 - DNA, 20 bp, Homo Sapiens
ctgactttgaaattccaact

SEQ ID NO: 1168 - DNA, 20 bp, Homo Sapiens
tgactttgaaattccaactt

SEQ ID NO: 1169 - DNA, 20 bp, Homo Sapiens
gactttgaaattccaacttc

SEQ ID NO: 1170 - DNA, 20 bp, Homo Sapiens
actttgaaattccaacttct

SEQ ID NO: 1171 - DNA, 20 bp, Homo Sapiens
ctttgaaattccaacttcta

SEQ ID NO: 1172 - DNA, 20 bp, Homo Sapiens
tttgaaattccaacttctaa

SEQ ID NO: 1173 - DNA, 20 bp, Homo Sapiens
ttgaaattccaacttctaat

SEQ ID NO: 1174 - DNA, 20 bp, Homo Sapiens
tgaaattccaacttctaata

SEQ ID NO: 1175 - DNA, 20 bp, Homo Sapiens
gaaattccaacttctaatat

SEQ ID NO: 1176 - DNA, 20 bp, Homo Sapiens
aaattccaacttctaatatt

SEQ ID NO: 1177 - DNA, 20 bp, Homo Sapiens
aattccaacttctaatatta

SEQ ID NO: 1178 - DNA, 20 bp, Homo Sapiens
attccaacttctaatattag

SEQ ID NO: 1179 - DNA, 20 bp, Homo Sapiens
ttccaacttctaatattaga

SEQ ID NO: 1180 - DNA, 20 bp, Homo Sapiens
tccaacttctaatattagaa

SEQ ID NO: 1181 - DNA, 20 bp, Homo Sapiens
ccaacttctaatattagaag

SEQ ID NO: 1182 - DNA, 20 bp, Homo Sapiens
caacttctaatattagaagg

SEQ ID NO: 1183 - DNA, 20 bp, Homo Sapiens
aacttctaatattagaagga

SEQ ID NO: 1184 - DNA, 20 bp, Homo Sapiens
acttctaatattagaaggat

SEQ ID NO: 1185 - DNA, 20 bp, Homo Sapiens
cttctaatattagaaggata

SEQ ID NO: 1186 - DNA, 20 bp, Homo Sapiens
ttctaatattagaaggataa

SEQ ID NO: 1187 - DNA, 20 bp, Homo Sapiens
tctaatattagaaggataat

SEQ ID NO: 1188 - DNA, 20 bp, Homo Sapiens
ctaatattagaaggataatt

SEQ ID NO: 1189 - DNA, 20 bp, Homo Sapiens
taatattagaaggataattt

SEQ ID NO: 1190 - DNA, 20 bp, Homo Sapiens
aatattagaaggataatttg

SEQ ID NO: 1191 - DNA, 20 bp, Homo Sapiens
atattagaaggataatttgc

SEQ ID NO: 1192 - DNA, 20 bp, Homo Sapiens
tattagaaggataatttgct

SEQ ID NO: 1193 - DNA, 20 bp, Homo Sapiens
attagaaggataatttgctc

SEQ ID NO: 1194 - DNA, 20 bp, Homo Sapiens
ttagaaggataatttgctca

SEQ ID NO: 1195 - DNA, 20 bp, Homo Sapiens
tagaaggataatttgctcaa

SEQ ID NO: 1196 - DNA, 20 bp, Homo Sapiens
agaaggataatttgctcaac

SEQ ID NO: 1197 - DNA, 20 bp, Homo Sapiens
gaaggataatttgctcaacc

SEQ ID NO: 1198 - DNA, 20 bp, Homo Sapiens
aaggataatttgctcaacct

SEQ ID NO: 1199 - DNA, 20 bp, Homo Sapiens
aggataatttgctcaacctc

SEQ ID NO: 1200 - DNA, 20 bp, Homo Sapiens
ggataatttgctcaacctct

SEQ ID NO: 1201 - DNA, 20 bp, Homo Sapiens
gataatttgctcaacctctg

SEQ ID NO: 1202 - DNA, 20 bp, Homo Sapiens
ataatttgctcaacctctgg

SEQ ID NO: 1203 - DNA, 20 bp, Homo Sapiens
taatttgctcaacctctgga

SEQ ID NO: 1204 - DNA, 20 bp, Homo Sapiens
aatttgctcaacctctggag

SEQ ID NO: 1205 - DNA, 20 bp, Homo Sapiens
atttgctcaacctctggagg

SEQ ID NO: 1206 - DNA, 20 bp, Homo Sapiens
tttgctcaacctctggaggt

SEQ ID NO: 1207 - DNA, 20 bp, Homo Sapiens
ttgctcaacctctggaggtt

SEQ ID NO: 1208 - DNA, 20 bp, Homo Sapiens
tgctcaacctctggaggttt

SEQ ID NO: 1209 - DNA, 20 bp, Homo Sapiens
gctcaacctctggaggtttt

SEQ ID NO: 1210 - DNA, 20 bp, Homo Sapiens
ctcaacctctggaggttttc

SEQ ID NO: 1211 - DNA, 20 bp, Homo Sapiens
tcaacctctggaggttttcc

SEQ ID NO: 1212 - DNA, 20 bp, Homo Sapiens
caacctctggaggttttcca

SEQ ID NO: 1213 - DNA, 20 bp, Homo Sapiens
aacctctggaggttttccag

SEQ ID NO: 1214 - DNA, 20 bp, Homo Sapiens
acctctggaggttttccaga

SEQ ID NO: 1215 - DNA, 20 bp, Homo Sapiens
cctctggaggttttccagag

SEQ ID NO: 1216 - DNA, 20 bp, Homo Sapiens
ctctggaggttttccagagc

SEQ ID NO: 1217 - DNA, 20 bp, Homo Sapiens
tctggaggttttccagagcc

SEQ ID NO: 1218 - DNA, 20 bp, Homo Sapiens
ctggaggttttccagagcct

SEQ ID NO: 1219 - DNA, 20 bp, Homo Sapiens
tggaggttttccagagcctc

SEQ ID NO: 1220 - DNA, 20 bp, Homo Sapiens
ggaggttttccagagcctca

SEQ ID NO: 1221 - DNA, 20 bp, Homo Sapiens
gaggttttccagagcctcac

SEQ ID NO: 1222 - DNA, 20 bp, Homo Sapiens
aggttttccagagcctcacc

SEQ ID NO: 1223 - DNA, 20 bp, Homo Sapiens
ggttttccagagcctcacct

SEQ ID NO: 1224 - DNA, 20 bp, Homo Sapiens
gttttccagagcctcacctc

SEQ ID NO: 1225 - DNA, 20 bp, Homo Sapiens
ttttccagagcctcacctct

SEQ ID NO: 1226 - DNA, 20 bp, Homo Sapiens
tttccagagcctcacctctc

SEQ ID NO: 1227 - DNA, 20 bp, Homo Sapiens
ttccagagcctcacctctcc

SEQ ID NO: 1228 - DNA, 20 bp, Homo Sapiens
tccagagcctcacctctcct

SEQ ID NO: 1229 - DNA, 20 bp, Homo Sapiens
ccagagcctcacctctcctg

SEQ ID NO: 1230 - DNA, 20 bp, Homo Sapiens
cagagcctcacctctcctgg

SEQ ID NO: 1231 - DNA, 20 bp, Homo Sapiens
agagcctcacctctcctggt

SEQ ID NO: 1232 - DNA, 20 bp, Homo Sapiens
gagcctcacctctcctggtt

SEQ ID NO: 1233 - DNA, 20 bp, Homo Sapiens
agcctcacctctcctggttg

SEQ ID NO: 1234 - DNA, 20 bp, Homo Sapiens
gcctcacctctcctggttgg

SEQ ID NO: 1235 - DNA, 20 bp, Homo Sapiens
cctcacctctcctggttgga

SEQ ID NO: 1236 - DNA, 20 bp, Homo Sapiens
ctcacctctcctggttggaa

SEQ ID NO: 1237 - DNA, 20 bp, Homo Sapiens
tcacctctcctggttggaaa

SEQ ID NO: 1238 - DNA, 20 bp, Homo Sapiens
cacctctcctggttggaaaa

SEQ ID NO: 1239 - DNA, 20 bp, Homo Sapiens
acctctcctggttggaaaat

SEQ ID NO: 1240 - DNA, 20 bp, Homo Sapiens
cctctcctggttggaaaatg

SEQ ID NO: 1241 - DNA, 20 bp, Homo Sapiens
ctctcctggttggaaaatgg

SEQ ID NO: 1242 - DNA, 20 bp, Homo Sapiens
tctcctggttggaaaatgga

SEQ ID NO: 1243 - DNA, 20 bp, Homo Sapiens
ctcctggttggaaaatggag

SEQ ID NO: 1244 - DNA, 20 bp, Homo Sapiens
tcctggttggaaaatggaga

SEQ ID NO: 1245 - DNA, 20 bp, Homo Sapiens
cctggttggaaaatggagaa

SEQ ID NO: 1246 - DNA, 20 bp, Homo Sapiens
ctggttggaaaatggagaag

SEQ ID NO: 1247 - DNA, 20 bp, Homo Sapiens
tggttggaaaatggagaaga

SEQ ID NO: 1248 - DNA, 20 bp, Homo Sapiens
ggttggaaaatggagaagaa

SEQ ID NO: 1249 - DNA, 20 bp, Homo Sapiens
gttggaaaatggagaagaat

SEQ ID NO: 1250 - DNA, 20 bp, Homo Sapiens
ttggaaaatggagaagaatt

SEQ ID NO: 1251 - DNA, 20 bp, Homo Sapiens
tggaaaatggagaagaatta

SEQ ID NO: 1252 - DNA, 20 bp, Homo Sapiens
ggaaaatggagaagaattaa

SEQ ID NO: 1253 - DNA, 20 bp, Homo Sapiens
gaaaatggagaagaattaaa

SEQ ID NO: 1254 - DNA, 20 bp, Homo Sapiens
aaaatggagaagaattaaat

SEQ ID NO: 1255 - DNA, 20 bp, Homo Sapiens
aaatggagaagaattaaatg

SEQ ID NO: 1256 - DNA, 20 bp, Homo Sapiens
aatggagaagaattaaatgc

SEQ ID NO: 1257 - DNA, 20 bp, Homo Sapiens
atggagaagaattaaatgcc

SEQ ID NO: 1258 - DNA, 20 bp, Homo Sapiens
tggagaagaattaaatgcca

SEQ ID NO: 1259 - DNA, 20 bp, Homo Sapiens
ggagaagaattaaatgccat

SEQ ID NO: 1260 - DNA, 20 bp, Homo Sapiens
gagaagaattaaatgccatc

SEQ ID NO: 1261 - DNA, 20 bp, Homo Sapiens
agaagaattaaatgccatca

SEQ ID NO: 1262 - DNA, 20 bp, Homo Sapiens
gaagaattaaatgccatcaa

SEQ ID NO: 1263 - DNA, 20 bp, Homo Sapiens
aagaattaaatgccatcaac

SEQ ID NO: 1264 - DNA, 20 bp, Homo Sapiens
agaattaaatgccatcaaca

SEQ ID NO: 1265 - DNA, 20 bp, Homo Sapiens
gaattaaatgccatcaacac

SEQ ID NO: 1266 - DNA, 20 bp, Homo Sapiens
aattaaatgccatcaacaca

SEQ ID NO: 1267 - DNA, 20 bp, Homo Sapiens
attaaatgccatcaacacaa

SEQ ID NO: 1268 - DNA, 20 bp, Homo Sapiens
ttaaatgccatcaacacaac

SEQ ID NO: 1269 - DNA, 20 bp, Homo Sapiens
taaatgccatcaacacaaca

SEQ ID NO: 1270 - DNA, 20 bp, Homo Sapiens
aaatgccatcaacacaacag

SEQ ID NO: 1271 - DNA, 20 bp, Homo Sapiens
aatgccatcaacacaacagt

SEQ ID NO: 1272 - DNA, 20 bp, Homo Sapiens
atgccatcaacacaacagtt

SEQ ID NO: 1273 - DNA, 20 bp, Homo Sapiens
tgccatcaacacaacagttt

SEQ ID NO: 1274 - DNA, 20 bp, Homo Sapiens
gccatcaacacaacagtttc

SEQ ID NO: 1275 - DNA, 20 bp, Homo Sapiens
ccatcaacacaacagtttcc

SEQ ID NO: 1276 - DNA, 20 bp, Homo Sapiens
catcaacacaacagtttccc

SEQ ID NO: 1277 - DNA, 20 bp, Homo Sapiens
atcaacacaacagtttccca

SEQ ID NO: 1278 - DNA, 20 bp, Homo Sapiens
tcaacacaacagtttcccaa

SEQ ID NO: 1279 - DNA, 20 bp, Homo Sapiens
caacacaacagtttcccaag

SEQ ID NO: 1280 - DNA, 20 bp, Homo Sapiens
aacacaacagtttcccaaga

SEQ ID NO: 1281 - DNA, 20 bp, Homo Sapiens
acacaacagtttcccaagat

SEQ ID NO: 1282 - DNA, 20 bp, Homo Sapiens
cacaacagtttcccaagatc

SEQ ID NO: 1283 - DNA, 20 bp, Homo Sapiens
acaacagtttcccaagatcc

SEQ ID NO: 1284 - DNA, 20 bp, Homo Sapiens
caacagtttcccaagatcct

SEQ ID NO: 1285 - DNA, 20 bp, Homo Sapiens
aacagtttcccaagatcctg

SEQ ID NO: 1286 - DNA, 20 bp, Homo Sapiens
acagtttcccaagatcctga

SEQ ID NO: 1287 - DNA, 20 bp, Homo Sapiens
cagtttcccaagatcctgaa

SEQ ID NO: 1288 - DNA, 20 bp, Homo Sapiens
agtttcccaagatcctgaaa

SEQ ID NO: 1289 - DNA, 20 bp, Homo Sapiens
gtttcccaagatcctgaaac

SEQ ID NO: 1290 - DNA, 20 bp, Homo Sapiens
tttcccaagatcctgaaact

SEQ ID NO: 1291 - DNA, 20 bp, Homo Sapiens
ttcccaagatcctgaaactg

SEQ ID NO: 1292 - DNA, 20 bp, Homo Sapiens
tcccaagatcctgaaactga

SEQ ID NO: 1293 - DNA, 20 bp, Homo Sapiens
cccaagatcctgaaactgag

SEQ ID NO: 1294 - DNA, 20 bp, Homo Sapiens
ccaagatcctgaaactgagc

SEQ ID NO: 1295 - DNA, 20 bp, Homo Sapiens
caagatcctgaaactgagct

SEQ ID NO: 1296 - DNA, 20 bp, Homo Sapiens
aagatcctgaaactgagctc

SEQ ID NO: 1297 - DNA, 20 bp, Homo Sapiens
agatcctgaaactgagctct

SEQ ID NO: 1298 - DNA, 20 bp, Homo Sapiens
gatcctgaaactgagctcta

SEQ ID NO: 1299 - DNA, 20 bp, Homo Sapiens
atcctgaaactgagctctat

SEQ ID NO: 1300 - DNA, 20 bp, Homo Sapiens
tcctgaaactgagctctatg

SEQ ID NO: 1301 - DNA, 20 bp, Homo Sapiens
cctgaaactgagctctatgc

SEQ ID NO: 1302 - DNA, 20 bp, Homo Sapiens
ctgaaactgagctctatgct

SEQ ID NO: 1303 - DNA, 20 bp, Homo Sapiens
tgaaactgagctctatgctg

SEQ ID NO: 1304 - DNA, 20 bp, Homo Sapiens
gaaactgagctctatgctgt

SEQ ID NO: 1305 - DNA, 20 bp, Homo Sapiens
aaactgagctctatgctgtt

SEQ ID NO: 1306 - DNA, 20 bp, Homo Sapiens
aactgagctctatgctgtta

SEQ ID NO: 1307 - DNA, 20 bp, Homo Sapiens
actgagctctatgctgttag

SEQ ID NO: 1308 - DNA, 20 bp, Homo Sapiens
ctgagctctatgctgttagc

SEQ ID NO: 1309 - DNA, 20 bp, Homo Sapiens
tgagctctatgctgttagca

SEQ ID NO: 1310 - DNA, 20 bp, Homo Sapiens
gagctctatgctgttagcag

SEQ ID NO: 1311 - DNA, 20 bp, Homo Sapiens
agctctatgctgttagcagc

SEQ ID NO: 1312 - DNA, 20 bp, Homo Sapiens
gctctatgctgttagcagca

SEQ ID NO: 1313 - DNA, 20 bp, Homo Sapiens
ctctatgctgttagcagcaa

SEQ ID NO: 1314 - DNA, 20 bp, Homo Sapiens
tctatgctgttagcagcaaa

SEQ ID NO: 1315 - DNA, 20 bp, Homo Sapiens
ctatgctgttagcagcaaac

SEQ ID NO: 1316 - DNA, 20 bp, Homo Sapiens
tatgctgttagcagcaaact

SEQ ID NO: 1317 - DNA, 20 bp, Homo Sapiens
atgctgttagcagcaaactg

SEQ ID NO: 1318 - DNA, 20 bp, Homo Sapiens
tgctgttagcagcaaactgg

SEQ ID NO: 1319 - DNA, 20 bp, Homo Sapiens
gctgttagcagcaaactgga

SEQ ID NO: 1320 - DNA, 20 bp, Homo Sapiens
ctgttagcagcaaactggat

SEQ ID NO: 1321 - DNA, 20 bp, Homo Sapiens
tgttagcagcaaactggatt

SEQ ID NO: 1322 - DNA, 20 bp, Homo Sapiens
gttagcagcaaactggattt

SEQ ID NO: 1323 - DNA, 20 bp, Homo Sapiens
ttagcagcaaactggatttc

SEQ ID NO: 1324 - DNA, 20 bp, Homo Sapiens
tagcagcaaactggatttca

SEQ ID NO: 1325 - DNA, 20 bp, Homo Sapiens
agcagcaaactggatttcaa

SEQ ID NO: 1326 - DNA, 20 bp, Homo Sapiens
gcagcaaactggatttcaat

SEQ ID NO: 1327 - DNA, 20 bp, Homo Sapiens
cagcaaactggatttcaata

SEQ ID NO: 1328 - DNA, 20 bp, Homo Sapiens
agcaaactggatttcaatat

SEQ ID NO: 1329 - DNA, 20 bp, Homo Sapiens
gcaaactggatttcaatatg

SEQ ID NO: 1330 - DNA, 20 bp, Homo Sapiens
caaactggatttcaatatga

SEQ ID NO: 1331 - DNA, 20 bp, Homo Sapiens
aaactggatttcaatatgac

SEQ ID NO: 1332 - DNA, 20 bp, Homo Sapiens
aactggatttcaatatgaca

SEQ ID NO: 1333 - DNA, 20 bp, Homo Sapiens
actggatttcaatatgacaa

SEQ ID NO: 1334 - DNA, 20 bp, Homo Sapiens
ctggatttcaatatgacaac

SEQ ID NO: 1335 - DNA, 20 bp, Homo Sapiens
tggatttcaatatgacaacc

SEQ ID NO: 1336 - DNA, 20 bp, Homo Sapiens
ggatttcaatatgacaacca

SEQ ID NO: 1337 - DNA, 20 bp, Homo Sapiens
gatttcaatatgacaaccaa

SEQ ID NO: 1338 - DNA, 20 bp, Homo Sapiens
atttcaatatgacaaccaac

SEQ ID NO: 1339 - DNA, 20 bp, Homo Sapiens
tttcaatatgacaaccaacc

SEQ ID NO: 1340 - DNA, 20 bp, Homo Sapiens
ttcaatatgacaaccaacca

SEQ ID NO: 1341 - DNA, 20 bp, Homo Sapiens
tcaatatgacaaccaaccac

SEQ ID NO: 1342 - DNA, 20 bp, Homo Sapiens
caatatgacaaccaaccaca

SEQ ID NO: 1343 - DNA, 20 bp, Homo Sapiens
aatatgacaaccaaccacag

SEQ ID NO: 1344 - DNA, 20 bp, Homo Sapiens
atatgacaaccaaccacagc

SEQ ID NO: 1345 - DNA, 20 bp, Homo Sapiens
tatgacaaccaaccacagct

SEQ ID NO: 1346 - DNA, 20 bp, Homo Sapiens
atgacaaccaaccacagctt

SEQ ID NO: 1347 - DNA, 20 bp, Homo Sapiens
tgacaaccaaccacagcttc

SEQ ID NO: 1348 - DNA, 20 bp, Homo Sapiens
gacaaccaaccacagcttca

SEQ ID NO: 1349 - DNA, 20 bp, Homo Sapiens
acaaccaaccacagcttcat

SEQ ID NO: 1350 - DNA, 20 bp, Homo Sapiens
caaccaaccacagcttcatg

SEQ ID NO: 1351 - DNA, 20 bp, Homo Sapiens
aaccaaccacagcttcatgt

SEQ ID NO: 1352 - DNA, 20 bp, Homo Sapiens
accaaccacagcttcatgtg

SEQ ID NO: 1353 - DNA, 20 bp, Homo Sapiens
ccaaccacagcttcatgtgt

SEQ ID NO: 1354 - DNA, 20 bp, Homo Sapiens
caaccacagcttcatgtgtc

SEQ ID NO: 1355 - DNA, 20 bp, Homo Sapiens
aaccacagcttcatgtgtct

SEQ ID NO: 1356 - DNA, 20 bp, Homo Sapiens
accacagcttcatgtgtctc

SEQ ID NO: 1357 - DNA, 20 bp, Homo Sapiens
ccacagcttcatgtgtctca

SEQ ID NO: 1358 - DNA, 20 bp, Homo Sapiens
cacagcttcatgtgtctcat

SEQ ID NO: 1359 - DNA, 20 bp, Homo Sapiens
acagcttcatgtgtctcatc

SEQ ID NO: 1360 - DNA, 20 bp, Homo Sapiens
cagcttcatgtgtctcatca

SEQ ID NO: 1361 - DNA, 20 bp, Homo Sapiens
agcttcatgtgtctcatcaa

SEQ ID NO: 1362 - DNA, 20 bp, Homo Sapiens
gcttcatgtgtctcatcaag

SEQ ID NO: 1363 - DNA, 20 bp, Homo Sapiens
cttcatgtgtctcatcaagt

SEQ ID NO: 1364 - DNA, 20 bp, Homo Sapiens
ttcatgtgtctcatcaagta

SEQ ID NO: 1365 - DNA, 20 bp, Homo Sapiens
tcatgtgtctcatcaagtat

SEQ ID NO: 1366 - DNA, 20 bp, Homo Sapiens
catgtgtctcatcaagtatg

SEQ ID NO: 1367 - DNA, 20 bp, Homo Sapiens
atgtgtctcatcaagtatgg

SEQ ID NO: 1368 - DNA, 20 bp, Homo Sapiens
tgtgtctcatcaagtatgga

SEQ ID NO: 1369 - DNA, 20 bp, Homo Sapiens
gtgtctcatcaagtatggac

SEQ ID NO: 1370 - DNA, 20 bp, Homo Sapiens
tgtctcatcaagtatggaca

SEQ ID NO: 1371 - DNA, 20 bp, Homo Sapiens
gtctcatcaagtatggacat

SEQ ID NO: 1372 - DNA, 20 bp, Homo Sapiens
tctcatcaagtatggacatt

SEQ ID NO: 1373 - DNA, 20 bp, Homo Sapiens
ctcatcaagtatggacattt

SEQ ID NO: 1374 - DNA, 20 bp, Homo Sapiens
tcatcaagtatggacattta

SEQ ID NO: 1375 - DNA, 20 bp, Homo Sapiens
catcaagtatggacatttaa

SEQ ID NO: 1376 - DNA, 20 bp, Homo Sapiens
atcaagtatggacatttaag

SEQ ID NO: 1377 - DNA, 20 bp, Homo Sapiens
tcaagtatggacatttaaga

SEQ ID NO: 1378 - DNA, 20 bp, Homo Sapiens
caagtatggacatttaagag

SEQ ID NO: 1379 - DNA, 20 bp, Homo Sapiens
aagtatggacatttaagagt

SEQ ID NO: 1380 - DNA, 20 bp, Homo Sapiens
agtatggacatttaagagtg

SEQ ID NO: 1381 - DNA, 20 bp, Homo Sapiens
gtatggacatttaagagtga

SEQ ID NO: 1382 - DNA, 20 bp, Homo Sapiens
tatggacatttaagagtgaa

SEQ ID NO: 1383 - DNA, 20 bp, Homo Sapiens
atggacatttaagagtgaat

SEQ ID NO: 1384 - DNA, 20 bp, Homo Sapiens
tggacatttaagagtgaatc

SEQ ID NO: 1385 - DNA, 20 bp, Homo Sapiens
ggacatttaagagtgaatca

SEQ ID NO: 1386 - DNA, 20 bp, Homo Sapiens
gacatttaagagtgaatcag

SEQ ID NO: 1387 - DNA, 20 bp, Homo Sapiens
acatttaagagtgaatcaga

SEQ ID NO: 1388 - DNA, 20 bp, Homo Sapiens
catttaagagtgaatcagac

SEQ ID NO: 1389 - DNA, 20 bp, Homo Sapiens
atttaagagtgaatcagacc

SEQ ID NO: 1390 - DNA, 20 bp, Homo Sapiens
tttaagagtgaatcagacct

SEQ ID NO: 1391 - DNA, 20 bp, Homo Sapiens
ttaagagtgaatcagacctt

SEQ ID NO: 1392 - DNA, 20 bp, Homo Sapiens
taagagtgaatcagaccttc

SEQ ID NO: 1393 - DNA, 20 bp, Homo Sapiens
aagagtgaatcagaccttca

SEQ ID NO: 1394 - DNA, 20 bp, Homo Sapiens
agagtgaatcagaccttcaa

SEQ ID NO: 1395 - DNA, 20 bp, Homo Sapiens
gagtgaatcagaccttcaac

SEQ ID NO: 1396 - DNA, 20 bp, Homo Sapiens
agtgaatcagaccttcaact

SEQ ID NO: 1397 - DNA, 20 bp, Homo Sapiens
gtgaatcagaccttcaactg

SEQ ID NO: 1398 - DNA, 20 bp, Homo Sapiens
tgaatcagaccttcaactgg

SEQ ID NO: 1399 - DNA, 20 bp, Homo Sapiens
gaatcagaccttcaactgga

SEQ ID NO: 1400 - DNA, 20 bp, Homo Sapiens
aatcagaccttcaactggaa

SEQ ID NO: 1401 - DNA, 20 bp, Homo Sapiens
atcagaccttcaactggaat

SEQ ID NO: 1402 - DNA, 20 bp, Homo Sapiens
tcagaccttcaactggaata

SEQ ID NO: 1403 - DNA, 20 bp, Homo Sapiens
cagaccttcaactggaatac

SEQ ID NO: 1404 - DNA, 20 bp, Homo Sapiens
agaccttcaactggaataca

SEQ ID NO: 1405 - DNA, 20 bp, Homo Sapiens
gaccttcaactggaatacaa

SEQ ID NO: 1406 - DNA, 20 bp, Homo Sapiens
accttcaactggaatacaac

SEQ ID NO: 1407 - DNA, 20 bp, Homo Sapiens
ccttcaactggaatacaacc

SEQ ID NO: 1408 - DNA, 20 bp, Homo Sapiens
cttcaactggaatacaacca

SEQ ID NO: 1409 - DNA, 20 bp, Homo Sapiens
ttcaactggaatacaaccaa

SEQ ID NO: 1410 - DNA, 20 bp, Homo Sapiens
tcaactggaatacaaccaag

SEQ ID NO: 1411 - DNA, 20 bp, Homo Sapiens
caactggaatacaaccaagc

SEQ ID NO: 1412 - DNA, 20 bp, Homo Sapiens
aactggaatacaaccaagca

SEQ ID NO: 1413 - DNA, 20 bp, Homo Sapiens
actggaatacaaccaagcaa

SEQ ID NO: 1414 - DNA, 20 bp, Homo Sapiens
ctggaatacaaccaagcaag

SEQ ID NO: 1415 - DNA, 20 bp, Homo Sapiens
tggaatacaaccaagcaaga

SEQ ID NO: 1416 - DNA, 20 bp, Homo Sapiens
ggaatacaaccaagcaagag

SEQ ID NO: 1417 - DNA, 20 bp, Homo Sapiens
gaatacaaccaagcaagagc

SEQ ID NO: 1418 - DNA, 20 bp, Homo Sapiens
aatacaaccaagcaagagca

SEQ ID NO: 1419 - DNA, 20 bp, Homo Sapiens
atacaaccaagcaagagcat

SEQ ID NO: 1420 - DNA, 20 bp, Homo Sapiens
tacaaccaagcaagagcatt

SEQ ID NO: 1421 - DNA, 20 bp, Homo Sapiens
acaaccaagcaagagcattt

SEQ ID NO: 1422 - DNA, 20 bp, Homo Sapiens
caaccaagcaagagcatttt

SEQ ID NO: 1423 - DNA, 20 bp, Homo Sapiens
aaccaagcaagagcattttc

SEQ ID NO: 1424 - DNA, 20 bp, Homo Sapiens
accaagcaagagcattttcc

SEQ ID NO: 1425 - DNA, 20 bp, Homo Sapiens
ccaagcaagagcattttcct

SEQ ID NO: 1426 - DNA, 20 bp, Homo Sapiens
caagcaagagcattttcctg

SEQ ID NO: 1427 - DNA, 20 bp, Homo Sapiens
aagcaagagcattttcctga

SEQ ID NO: 1428 - DNA, 20 bp, Homo Sapiens
agcaagagcattttcctgat

SEQ ID NO: 1429 - DNA, 20 bp, Homo Sapiens
gcaagagcattttcctgata

SEQ ID NO: 1430 - DNA, 20 bp, Homo Sapiens
caagagcattttcctgataa

SEQ ID NO: 1431 - DNA, 20 bp, Homo Sapiens
aagagcattttcctgataac

SEQ ID NO: 1432 - DNA, 20 bp, Homo Sapiens
agagcattttcctgataacc

SEQ ID NO: 1433 - DNA, 20 bp, Homo Sapiens
gagcattttcctgataacct

SEQ ID NO: 1434 - DNA, 20 bp, Homo Sapiens
agcattttcctgataacctg

SEQ ID NO: 1435 - DNA, 20 bp, Homo Sapiens
gcattttcctgataacctgc

SEQ ID NO: 1436 - DNA, 20 bp, Homo Sapiens
cattttcctgataacctgct

SEQ ID NO: 1437 - DNA, 20 bp, Homo Sapiens
attttcctgataacctgctc

SEQ ID NO: 1438 - DNA, 20 bp, Homo Sapiens
ttttcctgataacctgctcc

SEQ ID NO: 1439 - DNA, 20 bp, Homo Sapiens
tttcctgataacctgctccc

SEQ ID NO: 1440 - DNA, 20 bp, Homo Sapiens
ttcctgataacctgctccca

SEQ ID NO: 1441 - DNA, 20 bp, Homo Sapiens
tcctgataacctgctcccat

SEQ ID NO: 1442 - DNA, 20 bp, Homo Sapiens
cctgataacctgctcccatc

SEQ ID NO: 1443 - DNA, 20 bp, Homo Sapiens
ctgataacctgctcccatcc

SEQ ID NO: 1444 - DNA, 20 bp, Homo Sapiens
tgataacctgctcccatcct

SEQ ID NO: 1445 - DNA, 20 bp, Homo Sapiens
gataacctgctcccatcctg

SEQ ID NO: 1446 - DNA, 20 bp, Homo Sapiens
ataacctgctcccatcctgg

SEQ ID NO: 1447 - DNA, 20 bp, Homo Sapiens
taacctgctcccatcctggg

SEQ ID NO: 1448 - DNA, 20 bp, Homo Sapiens
aacctgctcccatcctgggc

SEQ ID NO: 1449 - DNA, 20 bp, Homo Sapiens
acctgctcccatcctgggcc

SEQ ID NO: 1450 - DNA, 20 bp, Homo Sapiens
cctgctcccatcctgggcca

SEQ ID NO: 1451 - DNA, 20 bp, Homo Sapiens
ctgctcccatcctgggccat

SEQ ID NO: 1452 - DNA, 20 bp, Homo Sapiens
tgctcccatcctgggccatt

SEQ ID NO: 1453 - DNA, 20 bp, Homo Sapiens
gctcccatcctgggccatta

SEQ ID NO: 1454 - DNA, 20 bp, Homo Sapiens
ctcccatcctgggccattac

SEQ ID NO: 1455 - DNA, 20 bp, Homo Sapiens
tcccatcctgggccattacc

SEQ ID NO: 1456 - DNA, 20 bp, Homo Sapiens
cccatcctgggccattacct

SEQ ID NO: 1457 - DNA, 20 bp, Homo Sapiens
ccatcctgggccattacctt

SEQ ID NO: 1458 - DNA, 20 bp, Homo Sapiens
catcctgggccattacctta

SEQ ID NO: 1459 - DNA, 20 bp, Homo Sapiens
atcctgggccattaccttaa

SEQ ID NO: 1460 - DNA, 20 bp, Homo Sapiens
tcctgggccattaccttaat

SEQ ID NO: 1461 - DNA, 20 bp, Homo Sapiens
cctgggccattaccttaatc

SEQ ID NO: 1462 - DNA, 20 bp, Homo Sapiens
ctgggccattaccttaatct

SEQ ID NO: 1463 - DNA, 20 bp, Homo Sapiens
tgggccattaccttaatctc

SEQ ID NO: 1464 - DNA, 20 bp, Homo Sapiens
gggccattaccttaatctca

SEQ ID NO: 1465 - DNA, 20 bp, Homo Sapiens
ggccattaccttaatctcag

SEQ ID NO: 1466 - DNA, 20 bp, Homo Sapiens
gccattaccttaatctcagt

SEQ ID NO: 1467 - DNA, 20 bp, Homo Sapiens
ccattaccttaatctcagta

SEQ ID NO: 1468 - DNA, 20 bp, Homo Sapiens
cattaccttaatctcagtaa

SEQ ID NO: 1469 - DNA, 20 bp, Homo Sapiens
attaccttaatctcagtaaa

SEQ ID NO: 1470 - DNA, 20 bp, Homo Sapiens
ttaccttaatctcagtaaat

SEQ ID NO: 1471 - DNA, 20 bp, Homo Sapiens
taccttaatctcagtaaatg

SEQ ID NO: 1472 - DNA, 20 bp, Homo Sapiens
accttaatctcagtaaatgg

SEQ ID NO: 1473 - DNA, 20 bp, Homo Sapiens
ccttaatctcagtaaatgga

SEQ ID NO: 1474 - DNA, 20 bp, Homo Sapiens
cttaatctcagtaaatggaa

SEQ ID NO: 1475 - DNA, 20 bp, Homo Sapiens
ttaatctcagtaaatggaat

SEQ ID NO: 1476 - DNA, 20 bp, Homo Sapiens
taatctcagtaaatggaatt

SEQ ID NO: 1477 - DNA, 20 bp, Homo Sapiens
aatctcagtaaatggaattt

SEQ ID NO: 1478 - DNA, 20 bp, Homo Sapiens
atctcagtaaatggaatttt

SEQ ID NO: 1479 - DNA, 20 bp, Homo Sapiens
tctcagtaaatggaattttt

SEQ ID NO: 1480 - DNA, 20 bp, Homo Sapiens
ctcagtaaatggaatttttg

SEQ ID NO: 1481 - DNA, 20 bp, Homo Sapiens
tcagtaaatggaatttttgt

SEQ ID NO: 1482 - DNA, 20 bp, Homo Sapiens
cagtaaatggaatttttgtg

SEQ ID NO: 1483 - DNA, 20 bp, Homo Sapiens
agtaaatggaatttttgtga

SEQ ID NO: 1484 - DNA, 20 bp, Homo Sapiens
gtaaatggaatttttgtgat

SEQ ID NO: 1485 - DNA, 20 bp, Homo Sapiens
taaatggaatttttgtgata

SEQ ID NO: 1486 - DNA, 20 bp, Homo Sapiens
aaatggaatttttgtgatat

SEQ ID NO: 1487 - DNA, 20 bp, Homo Sapiens
aatggaatttttgtgatatg

SEQ ID NO: 1488 - DNA, 20 bp, Homo Sapiens
atggaatttttgtgatatgc

SEQ ID NO: 1489 - DNA, 20 bp, Homo Sapiens
tggaatttttgtgatatgct

SEQ ID NO: 1490 - DNA, 20 bp, Homo Sapiens
ggaatttttgtgatatgctg

SEQ ID NO: 1491 - DNA, 20 bp, Homo Sapiens
gaatttttgtgatatgctgc

SEQ ID NO: 1492 - DNA, 20 bp, Homo Sapiens
aatttttgtgatatgctgcc

SEQ ID NO: 1493 - DNA, 20 bp, Homo Sapiens
atttttgtgatatgctgcct

SEQ ID NO: 1494 - DNA, 20 bp, Homo Sapiens
tttttgtgatatgctgcctg

SEQ ID NO: 1495 - DNA, 20 bp, Homo Sapiens
ttttgtgatatgctgcctga

SEQ ID NO: 1496 - DNA, 20 bp, Homo Sapiens
tttgtgatatgctgcctgac

SEQ ID NO: 1497 - DNA, 20 bp, Homo Sapiens
ttgtgatatgctgcctgacc

SEQ ID NO: 1498 - DNA, 20 bp, Homo Sapiens
tgtgatatgctgcctgacct

SEQ ID NO: 1499 - DNA, 20 bp, Homo Sapiens
gtgatatgctgcctgaccta

SEQ ID NO: 1500 - DNA, 20 bp, Homo Sapiens
tgatatgctgcctgacctac

SEQ ID NO: 1501 - DNA, 20 bp, Homo Sapiens
gatatgctgcctgacctact

SEQ ID NO: 1502 - DNA, 20 bp, Homo Sapiens
atatgctgcctgacctactg

SEQ ID NO: 1503 - DNA, 20 bp, Homo Sapiens
tatgctgcctgacctactgc

SEQ ID NO: 1504 - DNA, 20 bp, Homo Sapiens
atgctgcctgacctactgct

SEQ ID NO: 1505 - DNA, 20 bp, Homo Sapiens
tgctgcctgacctactgctt

SEQ ID NO: 1506 - DNA, 20 bp, Homo Sapiens
gctgcctgacctactgcttt

SEQ ID NO: 1507 - DNA, 20 bp, Homo Sapiens
ctgcctgacctactgctttg

SEQ ID NO: 1508 - DNA, 20 bp, Homo Sapiens
tgcctgacctactgctttgc

SEQ ID NO: 1509 - DNA, 20 bp, Homo Sapiens
gcctgacctactgctttgcc

SEQ ID NO: 1510 - DNA, 20 bp, Homo Sapiens
cctgacctactgctttgccc

SEQ ID NO: 1511 - DNA, 20 bp, Homo Sapiens
ctgacctactgctttgcccc

SEQ ID NO: 1512 - DNA, 20 bp, Homo Sapiens
tgacctactgctttgcccca

SEQ ID NO: 1513 - DNA, 20 bp, Homo Sapiens
gacctactgctttgccccaa

SEQ ID NO: 1514 - DNA, 20 bp, Homo Sapiens
acctactgctttgccccaag

SEQ ID NO: 1515 - DNA, 20 bp, Homo Sapiens
cctactgctttgccccaaga

SEQ ID NO: 1516 - DNA, 20 bp, Homo Sapiens
ctactgctttgccccaagat

SEQ ID NO: 1517 - DNA, 20 bp, Homo Sapiens
tactgctttgccccaagatg

SEQ ID NO: 1518 - DNA, 20 bp, Homo Sapiens
actgctttgccccaagatgc

SEQ ID NO: 1519 - DNA, 20 bp, Homo Sapiens
ctgctttgccccaagatgca

SEQ ID NO: 1520 - DNA, 20 bp, Homo Sapiens
tgctttgccccaagatgcag

SEQ ID NO: 1521 - DNA, 20 bp, Homo Sapiens
gctttgccccaagatgcaga

SEQ ID NO: 1522 - DNA, 20 bp, Homo Sapiens
ctttgccccaagatgcagag

SEQ ID NO: 1523 - DNA, 20 bp, Homo Sapiens
tttgccccaagatgcagaga

SEQ ID NO: 1524 - DNA, 20 bp, Homo Sapiens
ttgccccaagatgcagagag

SEQ ID NO: 1525 - DNA, 20 bp, Homo Sapiens
tgccccaagatgcagagaga

SEQ ID NO: 1526 - DNA, 20 bp, Homo Sapiens
gccccaagatgcagagagag

SEQ ID NO: 1527 - DNA, 20 bp, Homo Sapiens
ccccaagatgcagagagaga

SEQ ID NO: 1528 - DNA, 20 bp, Homo Sapiens
cccaagatgcagagagagaa

SEQ ID NO: 1529 - DNA, 20 bp, Homo Sapiens
ccaagatgcagagagagaag

SEQ ID NO: 1530 - DNA, 20 bp, Homo Sapiens
caagatgcagagagagaagg

SEQ ID NO: 1531 - DNA, 20 bp, Homo Sapiens
aagatgcagagagagaagga

SEQ ID NO: 1532 - DNA, 20 bp, Homo Sapiens
agatgcagagagagaaggag

SEQ ID NO: 1533 - DNA, 20 bp, Homo Sapiens
gatgcagagagagaaggagg

SEQ ID NO: 1534 - DNA, 20 bp, Homo Sapiens
atgcagagagagaaggagga

SEQ ID NO: 1535 - DNA, 20 bp, Homo Sapiens
tgcagagagagaaggaggaa

SEQ ID NO: 1536 - DNA, 20 bp, Homo Sapiens
gcagagagagaaggaggaat

SEQ ID NO: 1537 - DNA, 20 bp, Homo Sapiens
cagagagagaaggaggaatg

SEQ ID NO: 1538 - DNA, 20 bp, Homo Sapiens
agagagagaaggaggaatga

SEQ ID NO: 1539 - DNA, 20 bp, Homo Sapiens
gagagagaaggaggaatgag

SEQ ID NO: 1540 - DNA, 20 bp, Homo Sapiens
agagagaaggaggaatgaga

SEQ ID NO: 1541 - DNA, 20 bp, Homo Sapiens
gagagaaggaggaatgagag

SEQ ID NO: 1542 - DNA, 20 bp, Homo Sapiens
agagaaggaggaatgagaga

SEQ ID NO: 1543 - DNA, 20 bp, Homo Sapiens
gagaaggaggaatgagagat

SEQ ID NO: 1544 - DNA, 20 bp, Homo Sapiens
agaaggaggaatgagagatt

SEQ ID NO: 1545 - DNA, 20 bp, Homo Sapiens
gaaggaggaatgagagattg

SEQ ID NO: 1546 - DNA, 20 bp, Homo Sapiens
aaggaggaatgagagattga

SEQ ID NO: 1547 - DNA, 20 bp, Homo Sapiens
aggaggaatgagagattgag

SEQ ID NO: 1548 - DNA, 20 bp, Homo Sapiens
ggaggaatgagagattgaga

SEQ ID NO: 1549 - DNA, 20 bp, Homo Sapiens
gaggaatgagagattgagaa

SEQ ID NO: 1550 - DNA, 20 bp, Homo Sapiens
aggaatgagagattgagaag

SEQ ID NO: 1551 - DNA, 20 bp, Homo Sapiens
ggaatgagagattgagaagg

SEQ ID NO: 1552 - DNA, 20 bp, Homo Sapiens
gaatgagagattgagaaggg

SEQ ID NO: 1553 - DNA, 20 bp, Homo Sapiens
aatgagagattgagaaggga

SEQ ID NO: 1554 - DNA, 20 bp, Homo Sapiens
atgagagattgagaagggaa

SEQ ID NO: 1555 - DNA, 20 bp, Homo Sapiens
tgagagattgagaagggaaa

SEQ ID NO: 1556 - DNA, 20 bp, Homo Sapiens
gagagattgagaagggaaag

SEQ ID NO: 1557 - DNA, 20 bp, Homo Sapiens
agagattgagaagggaaagt

SEQ ID NO: 1558 - DNA, 20 bp, Homo Sapiens
gagattgagaagggaaagtg

SEQ ID NO: 1559 - DNA, 20 bp, Homo Sapiens
agattgagaagggaaagtgt

SEQ ID NO: 1560 - DNA, 20 bp, Homo Sapiens
gattgagaagggaaagtgta

SEQ ID NO: 1561 - DNA, 20 bp, Homo Sapiens
attgagaagggaaagtgtac

SEQ ID NO: 1562 - DNA, 20 bp, Homo Sapiens
ttgagaagggaaagtgtacg

SEQ ID NO: 1563 - DNA, 20 bp, Homo Sapiens
tgagaagggaaagtgtacgc

SEQ ID NO: 1564 - DNA, 20 bp, Homo Sapiens
gagaagggaaagtgtacgcc

SEQ ID NO: 1565 - DNA, 20 bp, Homo Sapiens
agaagggaaagtgtacgccc

SEQ ID NO: 1566 - DNA, 20 bp, Homo Sapiens
gaagggaaagtgtacgccct

SEQ ID NO: 1567 - DNA, 20 bp, Homo Sapiens
aagggaaagtgtacgccctg

SEQ ID NO: 1568 - DNA, 20 bp, Homo Sapiens
agggaaagtgtacgccctgt

SEQ ID NO: 1569 - DNA, 20 bp, Homo Sapiens
gggaaagtgtacgccctgta

SEQ ID NO: 1570 - DNA, 20 bp, Homo Sapiens
ggaaagtgtacgccctgtat

SEQ ID NO: 1571 - DNA, 20 bp, Homo Sapiens
gaaagtgtacgccctgtata

SEQ ID NO: 1572 - DNA, 20 bp, Homo Sapiens
aaagtgtacgccctgtataa

SEQ ID NO: 1573 - DNA, 20 bp, Homo Sapiens
aagtgtacgccctgtataac

SEQ ID NO: 1574 - DNA, 20 bp, Homo Sapiens
agtgtacgccctgtataaca

SEQ ID NO: 1575 - DNA, 20 bp, Homo Sapiens
gtgtacgccctgtataacag

SEQ ID NO: 1576 - DNA, 20 bp, Homo Sapiens
tgtacgccctgtataacagt

SEQ ID NO: 1577 - DNA, 20 bp, Homo Sapiens
gtacgccctgtataacagtg

SEQ ID NO: 1578 - DNA, 20 bp, Homo Sapiens
tacgccctgtataacagtgt

SEQ ID NO: 1579 - DNA, 20 bp, Homo Sapiens
acgccctgtataacagtgtc

SEQ ID NO: 1580 - DNA, 20 bp, Homo Sapiens
cgccctgtataacagtgtcc

SEQ ID NO: 1581 - DNA, 20 bp, Homo Sapiens
gccctgtataacagtgtccg

SEQ ID NO: 1582 - DNA, 20 bp, Homo Sapiens
ccctgtataacagtgtccgc

SEQ ID NO: 1583 - DNA, 20 bp, Homo Sapiens
cctgtataacagtgtccgca

SEQ ID NO: 1584 - DNA, 20 bp, Homo Sapiens
ctgtataacagtgtccgcag

SEQ ID NO: 1585 - DNA, 20 bp, Homo Sapiens
tgtataacagtgtccgcaga

SEQ ID NO: 1586 - DNA, 20 bp, Homo Sapiens
gtataacagtgtccgcagaa

SEQ ID NO: 1587 - DNA, 20 bp, Homo Sapiens
tataacagtgtccgcagaag

SEQ ID NO: 1588 - DNA, 20 bp, Homo Sapiens
ataacagtgtccgcagaagc

SEQ ID NO: 1589 - DNA, 20 bp, Homo Sapiens
taacagtgtccgcagaagca

SEQ ID NO: 1590 - DNA, 20 bp, Homo Sapiens
aacagtgtccgcagaagcaa

SEQ ID NO: 1591 - DNA, 20 bp, Homo Sapiens
acagtgtccgcagaagcaag

SEQ ID NO: 1592 - DNA, 20 bp, Homo Sapiens
cagtgtccgcagaagcaagg

SEQ ID NO: 1593 - DNA, 20 bp, Homo Sapiens
agtgtccgcagaagcaaggg

SEQ ID NO: 1594 - DNA, 20 bp, Homo Sapiens
gtgtccgcagaagcaagggg

SEQ ID NO: 1595 - DNA, 20 bp, Homo Sapiens
tgtccgcagaagcaaggggc

SEQ ID NO: 1596 - DNA, 20 bp, Homo Sapiens
gtccgcagaagcaaggggct

SEQ ID NO: 1597 - DNA, 20 bp, Homo Sapiens
tccgcagaagcaaggggctg

SEQ ID NO: 1598 - DNA, 20 bp, Homo Sapiens
ccgcagaagcaaggggctga

SEQ ID NO: 1599 - DNA, 20 bp, Homo Sapiens
cgcagaagcaaggggctgaa

SEQ ID NO: 1600 - DNA, 20 bp, Homo Sapiens
gcagaagcaaggggctgaaa

SEQ ID NO: 1601 - DNA, 20 bp, Homo Sapiens
cagaagcaaggggctgaaaa

SEQ ID NO: 1602 - DNA, 20 bp, Homo Sapiens
agaagcaaggggctgaaaag

SEQ ID NO: 1603 - DNA, 20 bp, Homo Sapiens
gaagcaaggggctgaaaaga

SEQ ID NO: 1604 - DNA, 20 bp, Homo Sapiens
aagcaaggggctgaaaagat

SEQ ID NO: 1605 - DNA, 20 bp, Homo Sapiens
agcaaggggctgaaaagatc

SEQ ID NO: 1606 - DNA, 20 bp, Homo Sapiens
gcaaggggctgaaaagatct

SEQ ID NO: 1607 - DNA, 20 bp, Homo Sapiens
caaggggctgaaaagatctg

SEQ ID NO: 1608 - DNA, 20 bp, Homo Sapiens
aaggggctgaaaagatctga

SEQ ID NO: 1609 - DNA, 20 bp, Homo Sapiens
aggggctgaaaagatctgaa

SEQ ID NO: 1610 - DNA, 20 bp, Homo Sapiens
ggggctgaaaagatctgaag

SEQ ID NO: 1611 - DNA, 20 bp, Homo Sapiens
gggctgaaaagatctgaagg

SEQ ID NO: 1612 - DNA, 20 bp, Homo Sapiens
ggctgaaaagatctgaaggt

SEQ ID NO: 1613 - DNA, 20 bp, Homo Sapiens
gctgaaaagatctgaaggtc

SEQ ID NO: 1614 - DNA, 20 bp, Homo Sapiens
ctgaaaagatctgaaggtcc

SEQ ID NO: 1615 - DNA, 20 bp, Homo Sapiens
tgaaaagatctgaaggtccc

SEQ ID NO: 1616 - DNA, 20 bp, Homo Sapiens
gaaaagatctgaaggtccca

SEQ ID NO: 1617 - DNA, 20 bp, Homo Sapiens
aaaagatctgaaggtcccac

SEQ ID NO: 1618 - DNA, 20 bp, Homo Sapiens
aaagatctgaaggtcccacc

SEQ ID NO: 1619 - DNA, 20 bp, Homo Sapiens
aagatctgaaggtcccacct

SEQ ID NO: 1620 - DNA, 20 bp, Homo Sapiens
agatctgaaggtcccacctc

SEQ ID NO: 1621 - DNA, 20 bp, Homo Sapiens
gatctgaaggtcccacctcc

SEQ ID NO: 1622 - DNA, 20 bp, Homo Sapiens
atctgaaggtcccacctcca

SEQ ID NO: 1623 - DNA, 20 bp, Homo Sapiens
tctgaaggtcccacctccat

SEQ ID NO: 1624 - DNA, 20 bp, Homo Sapiens
ctgaaggtcccacctccatt

SEQ ID NO: 1625 - DNA, 20 bp, Homo Sapiens
tgaaggtcccacctccattt

SEQ ID NO: 1626 - DNA, 20 bp, Homo Sapiens
gaaggtcccacctccatttg

SEQ ID NO: 1627 - DNA, 20 bp, Homo Sapiens
aaggtcccacctccatttgc

SEQ ID NO: 1628 - DNA, 20 bp, Homo Sapiens
aggtcccacctccatttgca

SEQ ID NO: 1629 - DNA, 20 bp, Homo Sapiens
ggtcccacctccatttgcaa

SEQ ID NO: 1630 - DNA, 20 bp, Homo Sapiens
gtcccacctccatttgcaat

SEQ ID NO: 1631 - DNA, 20 bp, Homo Sapiens
tcccacctccatttgcaatt

SEQ ID NO: 1632 - DNA, 20 bp, Homo Sapiens
cccacctccatttgcaattg

SEQ ID NO: 1633 - DNA, 20 bp, Homo Sapiens
ccacctccatttgcaattga

SEQ ID NO: 1634 - DNA, 20 bp, Homo Sapiens
cacctccatttgcaattgac

SEQ ID NO: 1635 - DNA, 20 bp, Homo Sapiens
acctccatttgcaattgacc

SEQ ID NO: 1636 - DNA, 20 bp, Homo Sapiens
cctccatttgcaattgacct

SEQ ID NO: 1637 - DNA, 20 bp, Homo Sapiens
ctccatttgcaattgacctc

SEQ ID NO: 1638 - DNA, 20 bp, Homo Sapiens
tccatttgcaattgacctct

SEQ ID NO: 1639 - DNA, 20 bp, Homo Sapiens
ccatttgcaattgacctctt

SEQ ID NO: 1640 - DNA, 20 bp, Homo Sapiens
catttgcaattgacctcttc

SEQ ID NO: 1641 - DNA, 20 bp, Homo Sapiens
atttgcaattgacctcttct

SEQ ID NO: 1642 - DNA, 20 bp, Homo Sapiens
tttgcaattgacctcttctg

SEQ ID NO: 1643 - DNA, 20 bp, Homo Sapiens
ttgcaattgacctcttctgg

SEQ ID NO: 1644 - DNA, 20 bp, Homo Sapiens
tgcaattgacctcttctggg

SEQ ID NO: 1645 - DNA, 20 bp, Homo Sapiens
gcaattgacctcttctggga

SEQ ID NO: 1646 - DNA, 20 bp, Homo Sapiens
caattgacctcttctgggaa

SEQ ID NO: 1647 - DNA, 20 bp, Homo Sapiens
aattgacctcttctgggaac

SEQ ID NO: 1648 - DNA, 20 bp, Homo Sapiens
attgacctcttctgggaact

SEQ ID NO: 1649 - DNA, 20 bp, Homo Sapiens
ttgacctcttctgggaactt

SEQ ID NO: 1650 - DNA, 20 bp, Homo Sapiens
tgacctcttctgggaacttc

SEQ ID NO: 1651 - DNA, 20 bp, Homo Sapiens
gacctcttctgggaacttcc

SEQ ID NO: 1652 - DNA, 20 bp, Homo Sapiens
acctcttctgggaacttcct

SEQ ID NO: 1653 - DNA, 20 bp, Homo Sapiens
cctcttctgggaacttcctc

SEQ ID NO: 1654 - DNA, 20 bp, Homo Sapiens
ctcttctgggaacttcctca

SEQ ID NO: 1655 - DNA, 20 bp, Homo Sapiens
tcttctgggaacttcctcag

SEQ ID NO: 1656 - DNA, 20 bp, Homo Sapiens
cttctgggaacttcctcaga

SEQ ID NO: 1657 - DNA, 20 bp, Homo Sapiens
ttctgggaacttcctcagat

SEQ ID NO: 1658 - DNA, 20 bp, Homo Sapiens
tctgggaacttcctcagatg

SEQ ID NO: 1659 - DNA, 20 bp, Homo Sapiens
ctgggaacttcctcagatgg

SEQ ID NO: 1660 - DNA, 20 bp, Homo Sapiens
tgggaacttcctcagatgga

SEQ ID NO: 1661 - DNA, 20 bp, Homo Sapiens
gggaacttcctcagatggac

SEQ ID NO: 1662 - DNA, 20 bp, Homo Sapiens
ggaacttcctcagatggaca

SEQ ID NO: 1663 - DNA, 20 bp, Homo Sapiens
gaacttcctcagatggacaa

SEQ ID NO: 1664 - DNA, 20 bp, Homo Sapiens
aacttcctcagatggacaag

SEQ ID NO: 1665 - DNA, 20 bp, Homo Sapiens
acttcctcagatggacaaga

SEQ ID NO: 1666 - DNA, 20 bp, Homo Sapiens
cttcctcagatggacaagat

SEQ ID NO: 1667 - DNA, 20 bp, Homo Sapiens
ttcctcagatggacaagatt

SEQ ID NO: 1668 - DNA, 20 bp, Homo Sapiens
tcctcagatggacaagatta

SEQ ID NO: 1669 - DNA, 20 bp, Homo Sapiens
cctcagatggacaagattac

SEQ ID NO: 1670 - DNA, 20 bp, Homo Sapiens
ctcagatggacaagattacc

SEQ ID NO: 1671 - DNA, 20 bp, Homo Sapiens
tcagatggacaagattaccc

SEQ ID NO: 1672 - DNA, 20 bp, Homo Sapiens
cagatggacaagattacccc

SEQ ID NO: 1673 - DNA, 20 bp, Homo Sapiens
agatggacaagattacccca

SEQ ID NO: 1674 - DNA, 20 bp, Homo Sapiens
gatggacaagattaccccac

SEQ ID NO: 1675 - DNA, 20 bp, Homo Sapiens
atggacaagattaccccacc

SEQ ID NO: 1676 - DNA, 20 bp, Homo Sapiens
tggacaagattaccccacct

SEQ ID NO: 1677 - DNA, 20 bp, Homo Sapiens
ggacaagattaccccacctt

SEQ ID NO: 1678 - DNA, 20 bp, Homo Sapiens
gacaagattaccccaccttg

SEQ ID NO: 1679 - DNA, 20 bp, Homo Sapiens
acaagattaccccaccttgc

SEQ ID NO: 1680 - DNA, 20 bp, Homo Sapiens
caagattaccccaccttgcc

SEQ ID NO: 1681 - DNA, 20 bp, Homo Sapiens
aagattaccccaccttgccc

SEQ ID NO: 1682 - DNA, 20 bp, Homo Sapiens
agattaccccaccttgccct

SEQ ID NO: 1683 - DNA, 20 bp, Homo Sapiens
gattaccccaccttgccctt

SEQ ID NO: 1684 - DNA, 20 bp, Homo Sapiens
attaccccaccttgcccttt

SEQ ID NO: 1685 - DNA, 20 bp, Homo Sapiens
ttaccccaccttgcccttta

SEQ ID NO: 1686 - DNA, 20 bp, Homo Sapiens
taccccaccttgccctttac

SEQ ID NO: 1687 - DNA, 20 bp, Homo Sapiens
accccaccttgccctttacg

SEQ ID NO: 1688 - DNA, 20 bp, Homo Sapiens
ccccaccttgccctttacgt

SEQ ID NO: 1689 - DNA, 20 bp, Homo Sapiens
cccaccttgccctttacgta

SEQ ID NO: 1690 - DNA, 20 bp, Homo Sapiens
ccaccttgccctttacgtat

SEQ ID NO: 1691 - DNA, 20 bp, Homo Sapiens
caccttgccctttacgtatc

SEQ ID NO: 1692 - DNA, 20 bp, Homo Sapiens
accttgccctttacgtatct

SEQ ID NO: 1693 - DNA, 20 bp, Homo Sapiens
ccttgccctttacgtatctg

SEQ ID NO: 1694 - DNA, 20 bp, Homo Sapiens
cttgccctttacgtatctgc

SEQ ID NO: 1695 - DNA, 20 bp, Homo Sapiens
ttgccctttacgtatctgct

SEQ ID NO: 1696 - DNA, 20 bp, Homo Sapiens
tgccctttacgtatctgctc

SEQ ID NO: 1697 - DNA, 20 bp, Homo Sapiens
gccctttacgtatctgctct

SEQ ID NO: 1698 - DNA, 20 bp, Homo Sapiens
ccctttacgtatctgctctt

SEQ ID NO: 1699 - DNA, 20 bp, Homo Sapiens
cctttacgtatctgctctta

SEQ ID NO: 1700 - DNA, 20 bp, Homo Sapiens
ctttacgtatctgctcttag

SEQ ID NO: 1701 - DNA, 20 bp, Homo Sapiens
tttacgtatctgctcttagg

SEQ ID NO: 1702 - DNA, 20 bp, Homo Sapiens
ttacgtatctgctcttaggt

SEQ ID NO: 1703 - DNA, 20 bp, Homo Sapiens
tacgtatctgctcttaggtg

SEQ ID NO: 1704 - DNA, 20 bp, Homo Sapiens
acgtatctgctcttaggtgc

SEQ ID NO: 1705 - DNA, 20 bp, Homo Sapiens
cgtatctgctcttaggtgct

SEQ ID NO: 1706 - DNA, 20 bp, Homo Sapiens
gtatctgctcttaggtgctt

SEQ ID NO: 1707 - DNA, 20 bp, Homo Sapiens
tatctgctcttaggtgcttc

SEQ ID NO: 1708 - DNA, 20 bp, Homo Sapiens
atctgctcttaggtgcttct

SEQ ID NO: 1709 - DNA, 20 bp, Homo Sapiens
tctgctcttaggtgcttctt

SEQ ID NO: 1710 - DNA, 20 bp, Homo Sapiens
ctgctcttaggtgcttcttc

SEQ ID NO: 1711 - DNA, 20 bp, Homo Sapiens
tgctcttaggtgcttcttca

SEQ ID NO: 1712 - DNA, 20 bp, Homo Sapiens
gctcttaggtgcttcttcac

SEQ ID NO: 1713 - DNA, 20 bp, Homo Sapiens
ctcttaggtgcttcttcact

SEQ ID NO: 1714 - DNA, 20 bp, Homo Sapiens
tcttaggtgcttcttcactt

SEQ ID NO: 1715 - DNA, 20 bp, Homo Sapiens
cttaggtgcttcttcacttc

SEQ ID NO: 1716 - DNA, 20 bp, Homo Sapiens
ttaggtgcttcttcacttca

SEQ ID NO: 1717 - DNA, 20 bp, Homo Sapiens
taggtgcttcttcacttcag

SEQ ID NO: 1718 - DNA, 20 bp, Homo Sapiens
aggtgcttcttcacttcagt

SEQ ID NO: 1719 - DNA, 20 bp, Homo Sapiens
ggtgcttcttcacttcagtt

SEQ ID NO: 1720 - DNA, 20 bp, Homo Sapiens
gtgcttcttcacttcagttg

SEQ ID NO: 1721 - DNA, 20 bp, Homo Sapiens
tgcttcttcacttcagttgc

SEQ ID NO: 1722 - DNA, 20 bp, Homo Sapiens
gcttcttcacttcagttgct

SEQ ID NO: 1723 - DNA, 20 bp, Homo Sapiens
cttcttcacttcagttgctt

SEQ ID NO: 1724 - DNA, 20 bp, Homo Sapiens
ttcttcacttcagttgcttt

SEQ ID NO: 1725 - DNA, 20 bp, Homo Sapiens
tcttcacttcagttgctttg

SEQ ID NO: 1726 - DNA, 20 bp, Homo Sapiens
cttcacttcagttgctttgc

SEQ ID NO: 1727 - DNA, 20 bp, Homo Sapiens
ttcacttcagttgctttgca

SEQ ID NO: 1728 - DNA, 20 bp, Homo Sapiens
tcacttcagttgctttgcag

SEQ ID NO: 1729 - DNA, 20 bp, Homo Sapiens
cacttcagttgctttgcagg

SEQ ID NO: 1730 - DNA, 20 bp, Homo Sapiens
acttcagttgctttgcagga

SEQ ID NO: 1731 - DNA, 20 bp, Homo Sapiens
cttcagttgctttgcaggaa

SEQ ID NO: 1732 - DNA, 20 bp, Homo Sapiens
ttcagttgctttgcaggaag

SEQ ID NO: 1733 - DNA, 20 bp, Homo Sapiens
tcagttgctttgcaggaagt

SEQ ID NO: 1734 - DNA, 20 bp, Homo Sapiens
cagttgctttgcaggaagtg

SEQ ID NO: 1735 - DNA, 20 bp, Homo Sapiens
agttgctttgcaggaagtgt

SEQ ID NO: 1736 - DNA, 20 bp, Homo Sapiens
gttgctttgcaggaagtgtc

SEQ ID NO: 1737 - DNA, 20 bp, Homo Sapiens
ttgctttgcaggaagtgtct

SEQ ID NO: 1738 - DNA, 20 bp, Homo Sapiens
tgctttgcaggaagtgtcta

SEQ ID NO: 1739 - DNA, 20 bp, Homo Sapiens
gctttgcaggaagtgtctag

SEQ ID NO: 1740 - DNA, 20 bp, Homo Sapiens
ctttgcaggaagtgtctaga

SEQ ID NO: 1741 - DNA, 20 bp, Homo Sapiens
tttgcaggaagtgtctagag

SEQ ID NO: 1742 - DNA, 20 bp, Homo Sapiens
ttgcaggaagtgtctagagg

SEQ ID NO: 1743 - DNA, 20 bp, Homo Sapiens
tgcaggaagtgtctagagga

SEQ ID NO: 1744 - DNA, 20 bp, Homo Sapiens
gcaggaagtgtctagaggaa

SEQ ID NO: 1745 - DNA, 20 bp, Homo Sapiens
caggaagtgtctagaggaat

SEQ ID NO: 1746 - DNA, 20 bp, Homo Sapiens
aggaagtgtctagaggaata

SEQ ID NO: 1747 - DNA, 20 bp, Homo Sapiens
ggaagtgtctagaggaatat

SEQ ID NO: 1748 - DNA, 20 bp, Homo Sapiens
gaagtgtctagaggaatatg

SEQ ID NO: 1749 - DNA, 20 bp, Homo Sapiens
aagtgtctagaggaatatgg

SEQ ID NO: 1750 - DNA, 20 bp, Homo Sapiens
agtgtctagaggaatatggt

SEQ ID NO: 1751 - DNA, 20 bp, Homo Sapiens
gtgtctagaggaatatggtg

SEQ ID NO: 1752 - DNA, 20 bp, Homo Sapiens
tgtctagaggaatatggtgg

SEQ ID NO: 1753 - DNA, 20 bp, Homo Sapiens
gtctagaggaatatggtggg

SEQ ID NO: 1754 - DNA, 20 bp, Homo Sapiens
tctagaggaatatggtgggc

SEQ ID NO: 1755 - DNA, 20 bp, Homo Sapiens
ctagaggaatatggtgggca

SEQ ID NO: 1756 - DNA, 20 bp, Homo Sapiens
tagaggaatatggtgggcac

SEQ ID NO: 1757 - DNA, 20 bp, Homo Sapiens
agaggaatatggtgggcaca

SEQ ID NO: 1758 - DNA, 20 bp, Homo Sapiens
gaggaatatggtgggcacag

SEQ ID NO: 1759 - DNA, 20 bp, Homo Sapiens
aggaatatggtgggcacaga

SEQ ID NO: 1760 - DNA, 20 bp, Homo Sapiens
ggaatatggtgggcacagaa

SEQ ID NO: 1761 - DNA, 20 bp, Homo Sapiens
gaatatggtgggcacagaag

SEQ ID NO: 1762 - DNA, 20 bp, Homo Sapiens
aatatggtgggcacagaagt

SEQ ID NO: 1763 - DNA, 20 bp, Homo Sapiens
atatggtgggcacagaagta

SEQ ID NO: 1764 - DNA, 20 bp, Homo Sapiens
tatggtgggcacagaagtag

SEQ ID NO: 1765 - DNA, 20 bp, Homo Sapiens
atggtgggcacagaagtagc

SEQ ID NO: 1766 - DNA, 20 bp, Homo Sapiens
tggtgggcacagaagtagct

SEQ ID NO: 1767 - DNA, 20 bp, Homo Sapiens
ggtgggcacagaagtagctc

SEQ ID NO: 1768 - DNA, 20 bp, Homo Sapiens
gtgggcacagaagtagctct

SEQ ID NO: 1769 - DNA, 20 bp, Homo Sapiens
tgggcacagaagtagctctg

SEQ ID NO: 1770 - DNA, 20 bp, Homo Sapiens
gggcacagaagtagctctgg

SEQ ID NO: 1771 - DNA, 20 bp, Homo Sapiens
ggcacagaagtagctctggt

SEQ ID NO: 1772 - DNA, 20 bp, Homo Sapiens
gcacagaagtagctctggtg

SEQ ID NO: 1773 - DNA, 20 bp, Homo Sapiens
cacagaagtagctctggtga

SEQ ID NO: 1774 - DNA, 20 bp, Homo Sapiens
acagaagtagctctggtgac

SEQ ID NO: 1775 - DNA, 20 bp, Homo Sapiens
cagaagtagctctggtgacc

SEQ ID NO: 1776 - DNA, 20 bp, Homo Sapiens
agaagtagctctggtgacct

SEQ ID NO: 1777 - DNA, 20 bp, Homo Sapiens
gaagtagctctggtgacctt

SEQ ID NO: 1778 - DNA, 20 bp, Homo Sapiens
aagtagctctggtgaccttg

SEQ ID NO: 1779 - DNA, 20 bp, Homo Sapiens
agtagctctggtgaccttga

SEQ ID NO: 1780 - DNA, 20 bp, Homo Sapiens
gtagctctggtgaccttgat

SEQ ID NO: 1781 - DNA, 20 bp, Homo Sapiens
tagctctggtgaccttgatc

SEQ ID NO: 1782 - DNA, 20 bp, Homo Sapiens
agctctggtgaccttgatca

SEQ ID NO: 1783 - DNA, 20 bp, Homo Sapiens
gctctggtgaccttgatcaa

SEQ ID NO: 1784 - DNA, 20 bp, Homo Sapiens
ctctggtgaccttgatcaag

SEQ ID NO: 1785 - DNA, 20 bp, Homo Sapiens
tctggtgaccttgatcaagg

SEQ ID NO: 1786 - DNA, 20 bp, Homo Sapiens
ctggtgaccttgatcaaggt

SEQ ID NO: 1787 - DNA, 20 bp, Homo Sapiens
tggtgaccttgatcaaggtg

SEQ ID NO: 1788 - DNA, 20 bp, Homo Sapiens
ggtgaccttgatcaaggtgt

SEQ ID NO: 1789 - DNA, 20 bp, Homo Sapiens
gtgaccttgatcaaggtgtt

SEQ ID NO: 1790 - DNA, 20 bp, Homo Sapiens
tgaccttgatcaaggtgttt

SEQ ID NO: 1791 - DNA, 20 bp, Homo Sapiens
gaccttgatcaaggtgtttt

SEQ ID NO: 1792 - DNA, 20 bp, Homo Sapiens
accttgatcaaggtgttttg

SEQ ID NO: 1793 - DNA, 20 bp, Homo Sapiens
ccttgatcaaggtgttttga

SEQ ID NO: 1794 - DNA, 20 bp, Homo Sapiens
cttgatcaaggtgttttgaa

SEQ ID NO: 1795 - DNA, 20 bp, Homo Sapiens
ttgatcaaggtgttttgaaa

SEQ ID NO: 1796 - DNA, 20 bp, Homo Sapiens
tgatcaaggtgttttgaaat

SEQ ID NO: 1797 - DNA, 20 bp, Homo Sapiens
gatcaaggtgttttgaaatg

SEQ ID NO: 1798 - DNA, 20 bp, Homo Sapiens
atcaaggtgttttgaaatgc

SEQ ID NO: 1799 - DNA, 20 bp, Homo Sapiens
tcaaggtgttttgaaatgca

SEQ ID NO: 1800 - DNA, 20 bp, Homo Sapiens
caaggtgttttgaaatgcag

SEQ ID NO: 1801 - DNA, 20 bp, Homo Sapiens
aaggtgttttgaaatgcaga

SEQ ID NO: 1802 - DNA, 20 bp, Homo Sapiens
aggtgttttgaaatgcagaa

SEQ ID NO: 1803 - DNA, 20 bp, Homo Sapiens
ggtgttttgaaatgcagaat

SEQ ID NO: 1804 - DNA, 20 bp, Homo Sapiens
gtgttttgaaatgcagaatt

SEQ ID NO: 1805 - DNA, 20 bp, Homo Sapiens
tgttttgaaatgcagaattc

SEQ ID NO: 1806 - DNA, 20 bp, Homo Sapiens
gttttgaaatgcagaattct

SEQ ID NO: 1807 - DNA, 20 bp, Homo Sapiens
ttttgaaatgcagaattctt

SEQ ID NO: 1808 - DNA, 20 bp, Homo Sapiens
tttgaaatgcagaattcttg

SEQ ID NO: 1809 - DNA, 20 bp, Homo Sapiens
ttgaaatgcagaattcttga

SEQ ID NO: 1810 - DNA, 20 bp, Homo Sapiens
tgaaatgcagaattcttgag

SEQ ID NO: 1811 - DNA, 20 bp, Homo Sapiens
gaaatgcagaattcttgagt

SEQ ID NO: 1812 - DNA, 20 bp, Homo Sapiens
aaatgcagaattcttgagtt

SEQ ID NO: 1813 - DNA, 20 bp, Homo Sapiens
aatgcagaattcttgagttc

SEQ ID NO: 1814 - DNA, 20 bp, Homo Sapiens
atgcagaattcttgagttct

SEQ ID NO: 1815 - DNA, 20 bp, Homo Sapiens
tgcagaattcttgagttctg

SEQ ID NO: 1816 - DNA, 20 bp, Homo Sapiens
gcagaattcttgagttctgg

SEQ ID NO: 1817 - DNA, 20 bp, Homo Sapiens
cagaattcttgagttctgga

SEQ ID NO: 1818 - DNA, 20 bp, Homo Sapiens
agaattcttgagttctggaa

SEQ ID NO: 1819 - DNA, 20 bp, Homo Sapiens
gaattcttgagttctggaag

SEQ ID NO: 1820 - DNA, 20 bp, Homo Sapiens
aattcttgagttctggaagg

SEQ ID NO: 1821 - DNA, 20 bp, Homo Sapiens
attcttgagttctggaaggg

SEQ ID NO: 1822 - DNA, 20 bp, Homo Sapiens
ttcttgagttctggaaggga

SEQ ID NO: 1823 - DNA, 20 bp, Homo Sapiens
tcttgagttctggaagggac

SEQ ID NO: 1824 - DNA, 20 bp, Homo Sapiens
cttgagttctggaagggact

SEQ ID NO: 1825 - DNA, 20 bp, Homo Sapiens
ttgagttctggaagggactt

SEQ ID NO: 1826 - DNA, 20 bp, Homo Sapiens
tgagttctggaagggacttt

SEQ ID NO: 1827 - DNA, 20 bp, Homo Sapiens
gagttctggaagggacttta

SEQ ID NO: 1828 - DNA, 20 bp, Homo Sapiens
agttctggaagggactttag

SEQ ID NO: 1829 - DNA, 20 bp, Homo Sapiens
gttctggaagggactttaga

SEQ ID NO: 1830 - DNA, 20 bp, Homo Sapiens
ttctggaagggactttagag

SEQ ID NO: 1831 - DNA, 20 bp, Homo Sapiens
tctggaagggactttagaga

SEQ ID NO: 1832 - DNA, 20 bp, Homo Sapiens
ctggaagggactttagagaa

SEQ ID NO: 1833 - DNA, 20 bp, Homo Sapiens
tggaagggactttagagaat

SEQ ID NO: 1834 - DNA, 20 bp, Homo Sapiens
ggaagggactttagagaata

SEQ ID NO: 1835 - DNA, 20 bp, Homo Sapiens
gaagggactttagagaatac

SEQ ID NO: 1836 - DNA, 20 bp, Homo Sapiens
aagggactttagagaatacc

SEQ ID NO: 1837 - DNA, 20 bp, Homo Sapiens
agggactttagagaatacca

SEQ ID NO: 1838 - DNA, 20 bp, Homo Sapiens
gggactttagagaataccag

SEQ ID NO: 1839 - DNA, 20 bp, Homo Sapiens
ggactttagagaataccagt

SEQ ID NO: 1840 - DNA, 20 bp, Homo Sapiens
gactttagagaataccagtg

SEQ ID NO: 1841 - DNA, 20 bp, Homo Sapiens
actttagagaataccagtgt

SEQ ID NO: 1842 - DNA, 20 bp, Homo Sapiens
ctttagagaataccagtgtt

SEQ ID NO: 1843 - DNA, 20 bp, Homo Sapiens
tttagagaataccagtgtta

SEQ ID NO: 1844 - DNA, 20 bp, Homo Sapiens
ttagagaataccagtgttat

SEQ ID NO: 1845 - DNA, 20 bp, Homo Sapiens
tagagaataccagtgttatt

SEQ ID NO: 1846 - DNA, 20 bp, Homo Sapiens
agagaataccagtgttatta

SEQ ID NO: 1847 - DNA, 20 bp, Homo Sapiens
gagaataccagtgttattaa

SEQ ID NO: 1848 - DNA, 20 bp, Homo Sapiens
agaataccagtgttattaat

SEQ ID NO: 1849 - DNA, 20 bp, Homo Sapiens
gaataccagtgttattaatg

SEQ ID NO: 1850 - DNA, 20 bp, Homo Sapiens
aataccagtgttattaatga

SEQ ID NO: 1851 - DNA, 20 bp, Homo Sapiens
ataccagtgttattaatgac

SEQ ID NO: 1852 - DNA, 20 bp, Homo Sapiens
taccagtgttattaatgaca

SEQ ID NO: 1853 - DNA, 20 bp, Homo Sapiens
accagtgttattaatgacaa

SEQ ID NO: 1854 - DNA, 20 bp, Homo Sapiens
ccagtgttattaatgacaaa

SEQ ID NO: 1855 - DNA, 20 bp, Homo Sapiens
cagtgttattaatgacaaag

SEQ ID NO: 1856 - DNA, 20 bp, Homo Sapiens
agtgttattaatgacaaagg

SEQ ID NO: 1857 - DNA, 20 bp, Homo Sapiens
gtgttattaatgacaaaggc

SEQ ID NO: 1858 - DNA, 20 bp, Homo Sapiens
tgttattaatgacaaaggca

SEQ ID NO: 1859 - DNA, 20 bp, Homo Sapiens
gttattaatgacaaaggcac

SEQ ID NO: 1860 - DNA, 20 bp, Homo Sapiens
ttattaatgacaaaggcact

SEQ ID NO: 1861 - DNA, 20 bp, Homo Sapiens
tattaatgacaaaggcactg

SEQ ID NO: 1862 - DNA, 20 bp, Homo Sapiens
attaatgacaaaggcactga

SEQ ID NO: 1863 - DNA, 20 bp, Homo Sapiens
ttaatgacaaaggcactgag

SEQ ID NO: 1864 - DNA, 20 bp, Homo Sapiens
taatgacaaaggcactgagg

SEQ ID NO: 1865 - DNA, 20 bp, Homo Sapiens
aatgacaaaggcactgaggc

SEQ ID NO: 1866 - DNA, 20 bp, Homo Sapiens
atgacaaaggcactgaggcc

SEQ ID NO: 1867 - DNA, 20 bp, Homo Sapiens
tgacaaaggcactgaggccc

SEQ ID NO: 1868 - DNA, 20 bp, Homo Sapiens
gacaaaggcactgaggccca

SEQ ID NO: 1869 - DNA, 20 bp, Homo Sapiens
acaaaggcactgaggcccag

SEQ ID NO: 1870 - DNA, 20 bp, Homo Sapiens
caaaggcactgaggcccagg

SEQ ID NO: 1871 - DNA, 20 bp, Homo Sapiens
aaaggcactgaggcccaggg

SEQ ID NO: 1872 - DNA, 20 bp, Homo Sapiens
aaggcactgaggcccaggga

SEQ ID NO: 1873 - DNA, 20 bp, Homo Sapiens
aggcactgaggcccagggag

SEQ ID NO: 1874 - DNA, 20 bp, Homo Sapiens
ggcactgaggcccagggagg

SEQ ID NO: 1875 - DNA, 20 bp, Homo Sapiens
gcactgaggcccagggaggt

SEQ ID NO: 1876 - DNA, 20 bp, Homo Sapiens
cactgaggcccagggaggtg

SEQ ID NO: 1877 - DNA, 20 bp, Homo Sapiens
actgaggcccagggaggtga

SEQ ID NO: 1878 - DNA, 20 bp, Homo Sapiens
ctgaggcccagggaggtgac

SEQ ID NO: 1879 - DNA, 20 bp, Homo Sapiens
tgaggcccagggaggtgacc

SEQ ID NO: 1880 - DNA, 20 bp, Homo Sapiens
gaggcccagggaggtgaccc

SEQ ID NO: 1881 - DNA, 20 bp, Homo Sapiens
aggcccagggaggtgacccg

SEQ ID NO: 1882 - DNA, 20 bp, Homo Sapiens
ggcccagggaggtgacccga

SEQ ID NO: 1883 - DNA, 20 bp, Homo Sapiens
gcccagggaggtgacccgaa

SEQ ID NO: 1884 - DNA, 20 bp, Homo Sapiens
cccagggaggtgacccgaat

SEQ ID NO: 1885 - DNA, 20 bp, Homo Sapiens
ccagggaggtgacccgaatt

SEQ ID NO: 1886 - DNA, 20 bp, Homo Sapiens
cagggaggtgacccgaatta

SEQ ID NO: 1887 - DNA, 20 bp, Homo Sapiens
agggaggtgacccgaattat

SEQ ID NO: 1888 - DNA, 20 bp, Homo Sapiens
gggaggtgacccgaattata

SEQ ID NO: 1889 - DNA, 20 bp, Homo Sapiens
ggaggtgacccgaattataa

SEQ ID NO: 1890 - DNA, 20 bp, Homo Sapiens
gaggtgacccgaattataaa

SEQ ID NO: 1891 - DNA, 20 bp, Homo Sapiens
aggtgacccgaattataaag

SEQ ID NO: 1892 - DNA, 20 bp, Homo Sapiens
ggtgacccgaattataaagg

SEQ ID NO: 1893 - DNA, 20 bp, Homo Sapiens
gtgacccgaattataaaggc

SEQ ID NO: 1894 - DNA, 20 bp, Homo Sapiens
tgacccgaattataaaggcc

SEQ ID NO: 1895 - DNA, 20 bp, Homo Sapiens
gacccgaattataaaggcca

SEQ ID NO: 1896 - DNA, 20 bp, Homo Sapiens
acccgaattataaaggccag

SEQ ID NO: 1897 - DNA, 20 bp, Homo Sapiens
cccgaattataaaggccagc

SEQ ID NO: 1898 - DNA, 20 bp, Homo Sapiens
ccgaattataaaggccagcg

SEQ ID NO: 1899 - DNA, 20 bp, Homo Sapiens
cgaattataaaggccagcgc

SEQ ID NO: 1900 - DNA, 20 bp, Homo Sapiens
gaattataaaggccagcgcc

SEQ ID NO: 1901 - DNA, 20 bp, Homo Sapiens
aattataaaggccagcgcca

SEQ ID NO: 1902 - DNA, 20 bp, Homo Sapiens
attataaaggccagcgccag

SEQ ID NO: 1903 - DNA, 20 bp, Homo Sapiens
ttataaaggccagcgccaga

SEQ ID NO: 1904 - DNA, 20 bp, Homo Sapiens
tataaaggccagcgccagaa

SEQ ID NO: 1905 - DNA, 20 bp, Homo Sapiens
ataaaggccagcgccagaac

SEQ ID NO: 1906 - DNA, 20 bp, Homo Sapiens
taaaggccagcgccagaacc

SEQ ID NO: 1907 - DNA, 20 bp, Homo Sapiens
aaaggccagcgccagaaccc

SEQ ID NO: 1908 - DNA, 20 bp, Homo Sapiens
aaggccagcgccagaaccca

SEQ ID NO: 1909 - DNA, 20 bp, Homo Sapiens
aggccagcgccagaacccag

SEQ ID NO: 1910 - DNA, 20 bp, Homo Sapiens
ggccagcgccagaacccaga

SEQ ID NO: 1911 - DNA, 20 bp, Homo Sapiens
gccagcgccagaacccagat

SEQ ID NO: 1912 - DNA, 20 bp, Homo Sapiens
ccagcgccagaacccagatt

SEQ ID NO: 1913 - DNA, 20 bp, Homo Sapiens
cagcgccagaacccagattt

SEQ ID NO: 1914 - DNA, 20 bp, Homo Sapiens
agcgccagaacccagatttc

SEQ ID NO: 1915 - DNA, 20 bp, Homo Sapiens
gcgccagaacccagatttcc

SEQ ID NO: 1916 - DNA, 20 bp, Homo Sapiens
cgccagaacccagatttcct

SEQ ID NO: 1917 - DNA, 20 bp, Homo Sapiens
gccagaacccagatttccta

SEQ ID NO: 1918 - DNA, 20 bp, Homo Sapiens
ccagaacccagatttcctaa

SEQ ID NO: 1919 - DNA, 20 bp, Homo Sapiens
cagaacccagatttcctaac

SEQ ID NO: 1920 - DNA, 20 bp, Homo Sapiens
agaacccagatttcctaact

SEQ ID NO: 1921 - DNA, 20 bp, Homo Sapiens
gaacccagatttcctaactc

SEQ ID NO: 1922 - DNA, 20 bp, Homo Sapiens
aacccagatttcctaactct

SEQ ID NO: 1923 - DNA, 20 bp, Homo Sapiens
acccagatttcctaactctg

SEQ ID NO: 1924 - DNA, 20 bp, Homo Sapiens
cccagatttcctaactctgg

SEQ ID NO: 1925 - DNA, 20 bp, Homo Sapiens
ccagatttcctaactctggt

SEQ ID NO: 1926 - DNA, 20 bp, Homo Sapiens
cagatttcctaactctggtg

SEQ ID NO: 1927 - DNA, 20 bp, Homo Sapiens
agatttcctaactctggtgc

SEQ ID NO: 1928 - DNA, 20 bp, Homo Sapiens
gatttcctaactctggtgct

SEQ ID NO: 1929 - DNA, 20 bp, Homo Sapiens
atttcctaactctggtgctc

SEQ ID NO: 1930 - DNA, 20 bp, Homo Sapiens
tttcctaactctggtgctct

SEQ ID NO: 1931 - DNA, 20 bp, Homo Sapiens
ttcctaactctggtgctctt

SEQ ID NO: 1932 - DNA, 20 bp, Homo Sapiens
tcctaactctggtgctcttt

SEQ ID NO: 1933 - DNA, 20 bp, Homo Sapiens
cctaactctggtgctctttc

SEQ ID NO: 1934 - DNA, 20 bp, Homo Sapiens
ctaactctggtgctctttcc

SEQ ID NO: 1935 - DNA, 20 bp, Homo Sapiens
taactctggtgctctttccc

SEQ ID NO: 1936 - DNA, 20 bp, Homo Sapiens
aactctggtgctctttccct

SEQ ID NO: 1937 - DNA, 20 bp, Homo Sapiens
actctggtgctctttccctt

SEQ ID NO: 1938 - DNA, 20 bp, Homo Sapiens
ctctggtgctctttcccttt

SEQ ID NO: 1939 - DNA, 20 bp, Homo Sapiens
tctggtgctctttcccttta

SEQ ID NO: 1940 - DNA, 20 bp, Homo Sapiens
ctggtgctctttccctttat

SEQ ID NO: 1941 - DNA, 20 bp, Homo Sapiens
tggtgctctttccctttatc

SEQ ID NO: 1942 - DNA, 20 bp, Homo Sapiens
ggtgctctttccctttatca

SEQ ID NO: 1943 - DNA, 20 bp, Homo Sapiens
gtgctctttccctttatcag

SEQ ID NO: 1944 - DNA, 20 bp, Homo Sapiens
tgctctttccctttatcagt

SEQ ID NO: 1945 - DNA, 20 bp, Homo Sapiens
gctctttccctttatcagtt

SEQ ID NO: 1946 - DNA, 20 bp, Homo Sapiens
ctctttccctttatcagttt

SEQ ID NO: 1947 - DNA, 20 bp, Homo Sapiens
tctttccctttatcagtttg

SEQ ID NO: 1948 - DNA, 20 bp, Homo Sapiens
ctttccctttatcagtttga

SEQ ID NO: 1949 - DNA, 20 bp, Homo Sapiens
tttccctttatcagtttgac

SEQ ID NO: 1950 - DNA, 20 bp, Homo Sapiens
ttccctttatcagtttgact

SEQ ID NO: 1951 - DNA, 20 bp, Homo Sapiens
tccctttatcagtttgactg

SEQ ID NO: 1952 - DNA, 20 bp, Homo Sapiens
ccctttatcagtttgactgt

SEQ ID NO: 1953 - DNA, 20 bp, Homo Sapiens
cctttatcagtttgactgtg

SEQ ID NO: 1954 - DNA, 20 bp, Homo Sapiens
ctttatcagtttgactgtgg

SEQ ID NO: 1955 - DNA, 20 bp, Homo Sapiens
tttatcagtttgactgtggc

SEQ ID NO: 1956 - DNA, 20 bp, Homo Sapiens
ttatcagtttgactgtggcc

SEQ ID NO: 1957 - DNA, 20 bp, Homo Sapiens
tatcagtttgactgtggcct

SEQ ID NO: 1958 - DNA, 20 bp, Homo Sapiens
atcagtttgactgtggcctg

SEQ ID NO: 1959 - DNA, 20 bp, Homo Sapiens
tcagtttgactgtggcctgt

SEQ ID NO: 1960 - DNA, 20 bp, Homo Sapiens
cagtttgactgtggcctgtt

SEQ ID NO: 1961 - DNA, 20 bp, Homo Sapiens
agtttgactgtggcctgtta

SEQ ID NO: 1962 - DNA, 20 bp, Homo Sapiens
gtttgactgtggcctgttaa

SEQ ID NO: 1963 - DNA, 20 bp, Homo Sapiens
tttgactgtggcctgttaac

SEQ ID NO: 1964 - DNA, 20 bp, Homo Sapiens
ttgactgtggcctgttaact

SEQ ID NO: 1965 - DNA, 20 bp, Homo Sapiens
tgactgtggcctgttaactg

SEQ ID NO: 1966 - DNA, 20 bp, Homo Sapiens
gactgtggcctgttaactgg

SEQ ID NO: 1967 - DNA, 20 bp, Homo Sapiens
actgtggcctgttaactggt

SEQ ID NO: 1968 - DNA, 20 bp, Homo Sapiens
ctgtggcctgttaactggta

SEQ ID NO: 1969 - DNA, 20 bp, Homo Sapiens
tgtggcctgttaactggtat

SEQ ID NO: 1970 - DNA, 20 bp, Homo Sapiens
gtggcctgttaactggtata

SEQ ID NO: 1971 - DNA, 20 bp, Homo Sapiens
tggcctgttaactggtatat

SEQ ID NO: 1972 - DNA, 20 bp, Homo Sapiens
ggcctgttaactggtatata

SEQ ID NO: 1973 - DNA, 20 bp, Homo Sapiens
gcctgttaactggtatatac

SEQ ID NO: 1974 - DNA, 20 bp, Homo Sapiens
cctgttaactggtatataca

SEQ ID NO: 1975 - DNA, 20 bp, Homo Sapiens
ctgttaactggtatatacat

SEQ ID NO: 1976 - DNA, 20 bp, Homo Sapiens
tgttaactggtatatacata

SEQ ID NO: 1977 - DNA, 20 bp, Homo Sapiens
gttaactggtatatacatat

SEQ ID NO: 1978 - DNA, 20 bp, Homo Sapiens
ttaactggtatatacatata

SEQ ID NO: 1979 - DNA, 20 bp, Homo Sapiens
taactggtatatacatatat

SEQ ID NO: 1980 - DNA, 20 bp, Homo Sapiens
aactggtatatacatatata

SEQ ID NO: 1981 - DNA, 20 bp, Homo Sapiens
actggtatatacatatatat

SEQ ID NO: 1982 - DNA, 20 bp, Homo Sapiens
ctggtatatacatatatatg

SEQ ID NO: 1983 - DNA, 20 bp, Homo Sapiens
tggtatatacatatatatgt

SEQ ID NO: 1984 - DNA, 20 bp, Homo Sapiens
ggtatatacatatatatgtc

SEQ ID NO: 1985 - DNA, 20 bp, Homo Sapiens
gtatatacatatatatgtca

SEQ ID NO: 1986 - DNA, 20 bp, Homo Sapiens
tatatacatatatatgtcag

SEQ ID NO: 1987 - DNA, 20 bp, Homo Sapiens
atatacatatatatgtcagg

SEQ ID NO: 1988 - DNA, 20 bp, Homo Sapiens
tatacatatatatgtcaggc

SEQ ID NO: 1989 - DNA, 20 bp, Homo Sapiens
atacatatatatgtcaggca

SEQ ID NO: 1990 - DNA, 20 bp, Homo Sapiens
tacatatatatgtcaggcaa

SEQ ID NO: 1991 - DNA, 20 bp, Homo Sapiens
acatatatatgtcaggcaaa

SEQ ID NO: 1992 - DNA, 20 bp, Homo Sapiens
catatatatgtcaggcaaag

SEQ ID NO: 1993 - DNA, 20 bp, Homo Sapiens
atatatatgtcaggcaaagt

SEQ ID NO: 1994 - DNA, 20 bp, Homo Sapiens
tatatatgtcaggcaaagtg

SEQ ID NO: 1995 - DNA, 20 bp, Homo Sapiens
atatatgtcaggcaaagtgc

SEQ ID NO: 1996 - DNA, 20 bp, Homo Sapiens
tatatgtcaggcaaagtgct

SEQ ID NO: 1997 - DNA, 20 bp, Homo Sapiens
atatgtcaggcaaagtgctg

SEQ ID NO: 1998 - DNA, 20 bp, Homo Sapiens
tatgtcaggcaaagtgctgc

SEQ ID NO: 1999 - DNA, 20 bp, Homo Sapiens
atgtcaggcaaagtgctgct

SEQ ID NO: 2000 - DNA, 20 bp, Homo Sapiens
tgtcaggcaaagtgctgctg

SEQ ID NO: 2001 - DNA, 20 bp, Homo Sapiens
gtcaggcaaagtgctgctgg

SEQ ID NO: 2002 - DNA, 20 bp, Homo Sapiens
tcaggcaaagtgctgctgga

SEQ ID NO: 2003 - DNA, 20 bp, Homo Sapiens
caggcaaagtgctgctggaa

SEQ ID NO: 2004 - DNA, 20 bp, Homo Sapiens
aggcaaagtgctgctggaag

SEQ ID NO: 2005 - DNA, 20 bp, Homo Sapiens
ggcaaagtgctgctggaagt

SEQ ID NO: 2006 - DNA, 20 bp, Homo Sapiens
gcaaagtgctgctggaagta

SEQ ID NO: 2007 - DNA, 20 bp, Homo Sapiens
caaagtgctgctggaagtag

SEQ ID NO: 2008 - DNA, 20 bp, Homo Sapiens
aaagtgctgctggaagtaga

SEQ ID NO: 2009 - DNA, 20 bp, Homo Sapiens
aagtgctgctggaagtagaa

SEQ ID NO: 2010 - DNA, 20 bp, Homo Sapiens
agtgctgctggaagtagaat

SEQ ID NO: 2011 - DNA, 20 bp, Homo Sapiens
gtgctgctggaagtagaatt

SEQ ID NO: 2012 - DNA, 20 bp, Homo Sapiens
tgctgctggaagtagaattt

SEQ ID NO: 2013 - DNA, 20 bp, Homo Sapiens
gctgctggaagtagaatttg

SEQ ID NO: 2014 - DNA, 20 bp, Homo Sapiens
ctgctggaagtagaatttgt

SEQ ID NO: 2015 - DNA, 20 bp, Homo Sapiens
tgctggaagtagaatttgtc

SEQ ID NO: 2016 - DNA, 20 bp, Homo Sapiens
gctggaagtagaatttgtcc

SEQ ID NO: 2017 - DNA, 20 bp, Homo Sapiens
ctggaagtagaatttgtcca

SEQ ID NO: 2018 - DNA, 20 bp, Homo Sapiens
tggaagtagaatttgtccaa

SEQ ID NO: 2019 - DNA, 20 bp, Homo Sapiens
ggaagtagaatttgtccaat

SEQ ID NO: 2020 - DNA, 20 bp, Homo Sapiens
gaagtagaatttgtccaata

SEQ ID NO: 2021 - DNA, 20 bp, Homo Sapiens
aagtagaatttgtccaataa

SEQ ID NO: 2022 - DNA, 20 bp, Homo Sapiens
agtagaatttgtccaataac

SEQ ID NO: 2023 - DNA, 20 bp, Homo Sapiens
gtagaatttgtccaataaca

SEQ ID NO: 2024 - DNA, 20 bp, Homo Sapiens
tagaatttgtccaataacag

SEQ ID NO: 2025 - DNA, 20 bp, Homo Sapiens
agaatttgtccaataacagg

SEQ ID NO: 2026 - DNA, 20 bp, Homo Sapiens
gaatttgtccaataacaggt

SEQ ID NO: 2027 - DNA, 20 bp, Homo Sapiens
aatttgtccaataacaggtc

SEQ ID NO: 2028 - DNA, 20 bp, Homo Sapiens
atttgtccaataacaggtca

SEQ ID NO: 2029 - DNA, 20 bp, Homo Sapiens
tttgtccaataacaggtcaa

SEQ ID NO: 2030 - DNA, 20 bp, Homo Sapiens
ttgtccaataacaggtcaac

SEQ ID NO: 2031 - DNA, 20 bp, Homo Sapiens
tgtccaataacaggtcaact

SEQ ID NO: 2032 - DNA, 20 bp, Homo Sapiens
gtccaataacaggtcaactt

SEQ ID NO: 2033 - DNA, 20 bp, Homo Sapiens
tccaataacaggtcaacttc

SEQ ID NO: 2034 - DNA, 20 bp, Homo Sapiens
ccaataacaggtcaacttca

SEQ ID NO: 2035 - DNA, 20 bp, Homo Sapiens
caataacaggtcaacttcag

SEQ ID NO: 2036 - DNA, 20 bp, Homo Sapiens
aataacaggtcaacttcaga

SEQ ID NO: 2037 - DNA, 20 bp, Homo Sapiens
ataacaggtcaacttcagag

SEQ ID NO: 2038 - DNA, 20 bp, Homo Sapiens
taacaggtcaacttcagaga

SEQ ID NO: 2039 - DNA, 20 bp, Homo Sapiens
aacaggtcaacttcagagac

SEQ ID NO: 2040 - DNA, 20 bp, Homo Sapiens
acaggtcaacttcagagact

SEQ ID NO: 2041 - DNA, 20 bp, Homo Sapiens
caggtcaacttcagagacta

SEQ ID NO: 2042 - DNA, 20 bp, Homo Sapiens
aggtcaacttcagagactat

SEQ ID NO: 2043 - DNA, 20 bp, Homo Sapiens
ggtcaacttcagagactatc

SEQ ID NO: 2044 - DNA, 20 bp, Homo Sapiens
gtcaacttcagagactatct

SEQ ID NO: 2045 - DNA, 20 bp, Homo Sapiens
tcaacttcagagactatctg

SEQ ID NO: 2046 - DNA, 20 bp, Homo Sapiens
caacttcagagactatctga

SEQ ID NO: 2047 - DNA, 20 bp, Homo Sapiens
aacttcagagactatctgat

SEQ ID NO: 2048 - DNA, 20 bp, Homo Sapiens
acttcagagactatctgatt

SEQ ID NO: 2049 - DNA, 20 bp, Homo Sapiens
cttcagagactatctgattt

SEQ ID NO: 2050 - DNA, 20 bp, Homo Sapiens
ttcagagactatctgatttc

SEQ ID NO: 2051 - DNA, 20 bp, Homo Sapiens
tcagagactatctgatttcc

SEQ ID NO: 2052 - DNA, 20 bp, Homo Sapiens
cagagactatctgatttcct

SEQ ID NO: 2053 - DNA, 20 bp, Homo Sapiens
agagactatctgatttccta

SEQ ID NO: 2054 - DNA, 20 bp, Homo Sapiens
gagactatctgatttcctaa

SEQ ID NO: 2055 - DNA, 20 bp, Homo Sapiens
agactatctgatttcctaat

SEQ ID NO: 2056 - DNA, 20 bp, Homo Sapiens
gactatctgatttcctaatg

SEQ ID NO: 2057 - DNA, 20 bp, Homo Sapiens
actatctgatttcctaatgt

SEQ ID NO: 2058 - DNA, 20 bp, Homo Sapiens
ctatctgatttcctaatgtc

SEQ ID NO: 2059 - DNA, 20 bp, Homo Sapiens
tatctgatttcctaatgtca

SEQ ID NO: 2060 - DNA, 20 bp, Homo Sapiens
atctgatttcctaatgtcag

SEQ ID NO: 2061 - DNA, 20 bp, Homo Sapiens
tctgatttcctaatgtcaga

SEQ ID NO: 2062 - DNA, 20 bp, Homo Sapiens
ctgatttcctaatgtcagag

SEQ ID NO: 2063 - DNA, 20 bp, Homo Sapiens
tgatttcctaatgtcagagt

SEQ ID NO: 2064 - DNA, 20 bp, Homo Sapiens
gatttcctaatgtcagagta

SEQ ID NO: 2065 - DNA, 20 bp, Homo Sapiens
atttcctaatgtcagagtag

SEQ ID NO: 2066 - DNA, 20 bp, Homo Sapiens
tttcctaatgtcagagtaga

SEQ ID NO: 2067 - DNA, 20 bp, Homo Sapiens
ttcctaatgtcagagtagaa

SEQ ID NO: 2068 - DNA, 20 bp, Homo Sapiens
tcctaatgtcagagtagaag

SEQ ID NO: 2069 - DNA, 20 bp, Homo Sapiens
cctaatgtcagagtagaaga

SEQ ID NO: 2070 - DNA, 20 bp, Homo Sapiens
ctaatgtcagagtagaagat

SEQ ID NO: 2071 - DNA, 20 bp, Homo Sapiens
taatgtcagagtagaagatt

SEQ ID NO: 2072 - DNA, 20 bp, Homo Sapiens
aatgtcagagtagaagattt

SEQ ID NO: 2073 - DNA, 20 bp, Homo Sapiens
atgtcagagtagaagatttt

SEQ ID NO: 2074 - DNA, 20 bp, Homo Sapiens
tgtcagagtagaagatttta

SEQ ID NO: 2075 - DNA, 20 bp, Homo Sapiens
gtcagagtagaagattttat

SEQ ID NO: 2076 - DNA, 20 bp, Homo Sapiens
tcagagtagaagattttatg

SEQ ID NO: 2077 - DNA, 20 bp, Homo Sapiens
cagagtagaagattttatgc

SEQ ID NO: 2078 - DNA, 20 bp, Homo Sapiens
agagtagaagattttatgct

SEQ ID NO: 2079 - DNA, 20 bp, Homo Sapiens
gagtagaagattttatgctg

SEQ ID NO: 2080 - DNA, 20 bp, Homo Sapiens
agtagaagattttatgctgc

SEQ ID NO: 2081 - DNA, 20 bp, Homo Sapiens
gtagaagattttatgctgct

SEQ ID NO: 2082 - DNA, 20 bp, Homo Sapiens
tagaagattttatgctgctg

SEQ ID NO: 2083 - DNA, 20 bp, Homo Sapiens
agaagattttatgctgctgt

SEQ ID NO: 2084 - DNA, 20 bp, Homo Sapiens
gaagattttatgctgctgtt

SEQ ID NO: 2085 - DNA, 20 bp, Homo Sapiens
aagattttatgctgctgttt

SEQ ID NO: 2086 - DNA, 20 bp, Homo Sapiens
agattttatgctgctgttta

SEQ ID NO: 2087 - DNA, 20 bp, Homo Sapiens
gattttatgctgctgtttac

SEQ ID NO: 2088 - DNA, 20 bp, Homo Sapiens
attttatgctgctgtttaca

SEQ ID NO: 2089 - DNA, 20 bp, Homo Sapiens
ttttatgctgctgtttacaa

SEQ ID NO: 2090 - DNA, 20 bp, Homo Sapiens
tttatgctgctgtttacaaa

SEQ ID NO: 2091 - DNA, 20 bp, Homo Sapiens
ttatgctgctgtttacaaaa

SEQ ID NO: 2092 - DNA, 20 bp, Homo Sapiens
tatgctgctgtttacaaaag

SEQ ID NO: 2093 - DNA, 20 bp, Homo Sapiens
atgctgctgtttacaaaagc

SEQ ID NO: 2094 - DNA, 20 bp, Homo Sapiens
tgctgctgtttacaaaagcc

SEQ ID NO: 2095 - DNA, 20 bp, Homo Sapiens
gctgctgtttacaaaagccc

SEQ ID NO: 2096 - DNA, 20 bp, Homo Sapiens
ctgctgtttacaaaagccca

SEQ ID NO: 2097 - DNA, 20 bp, Homo Sapiens
tgctgtttacaaaagcccaa

SEQ ID NO: 2098 - DNA, 20 bp, Homo Sapiens
gctgtttacaaaagcccaat

SEQ ID NO: 2099 - DNA, 20 bp, Homo Sapiens
ctgtttacaaaagcccaatg

SEQ ID NO: 2100 - DNA, 20 bp, Homo Sapiens
tgtttacaaaagcccaatgt

SEQ ID NO: 2101 - DNA, 20 bp, Homo Sapiens
gtttacaaaagcccaatgta

SEQ ID NO: 2102 - DNA, 20 bp, Homo Sapiens
tttacaaaagcccaatgtaa

SEQ ID NO: 2103 - DNA, 20 bp, Homo Sapiens
ttacaaaagcccaatgtaat

SEQ ID NO: 2104 - DNA, 20 bp, Homo Sapiens
tacaaaagcccaatgtaatg

SEQ ID NO: 2105 - DNA, 20 bp, Homo Sapiens
acaaaagcccaatgtaatgc

SEQ ID NO: 2106 - DNA, 20 bp, Homo Sapiens
caaaagcccaatgtaatgca

SEQ ID NO: 2107 - DNA, 20 bp, Homo Sapiens
aaaagcccaatgtaatgcat

SEQ ID NO: 2108 - DNA, 20 bp, Homo Sapiens
aaagcccaatgtaatgcata

SEQ ID NO: 2109 - DNA, 20 bp, Homo Sapiens
aagcccaatgtaatgcatag

SEQ ID NO: 2110 - DNA, 20 bp, Homo Sapiens
agcccaatgtaatgcatagg

SEQ ID NO: 2111 - DNA, 20 bp, Homo Sapiens
gcccaatgtaatgcatagga

SEQ ID NO: 2112 - DNA, 20 bp, Homo Sapiens
cccaatgtaatgcataggaa

SEQ ID NO: 2113 - DNA, 20 bp, Homo Sapiens
ccaatgtaatgcataggaag

SEQ ID NO: 2114 - DNA, 20 bp, Homo Sapiens
caatgtaatgcataggaagt

SEQ ID NO: 2115 - DNA, 20 bp, Homo Sapiens
aatgtaatgcataggaagta

SEQ ID NO: 2116 - DNA, 20 bp, Homo Sapiens
atgtaatgcataggaagtat

SEQ ID NO: 2117 - DNA, 20 bp, Homo Sapiens
tgtaatgcataggaagtatg

SEQ ID NO: 2118 - DNA, 20 bp, Homo Sapiens
gtaatgcataggaagtatgg

SEQ ID NO: 2119 - DNA, 20 bp, Homo Sapiens
taatgcataggaagtatggc

SEQ ID NO: 2120 - DNA, 20 bp, Homo Sapiens
aatgcataggaagtatggca

SEQ ID NO: 2121 - DNA, 20 bp, Homo Sapiens
atgcataggaagtatggcat

SEQ ID NO: 2122 - DNA, 20 bp, Homo Sapiens
tgcataggaagtatggcatg

SEQ ID NO: 2123 - DNA, 20 bp, Homo Sapiens
gcataggaagtatggcatga

SEQ ID NO: 2124 - DNA, 20 bp, Homo Sapiens
cataggaagtatggcatgaa

SEQ ID NO: 2125 - DNA, 20 bp, Homo Sapiens
ataggaagtatggcatgaac

SEQ ID NO: 2126 - DNA, 20 bp, Homo Sapiens
taggaagtatggcatgaaca

SEQ ID NO: 2127 - DNA, 20 bp, Homo Sapiens
aggaagtatggcatgaacat

SEQ ID NO: 2128 - DNA, 20 bp, Homo Sapiens
ggaagtatggcatgaacatc

SEQ ID NO: 2129 - DNA, 20 bp, Homo Sapiens
gaagtatggcatgaacatct

SEQ ID NO: 2130 - DNA, 20 bp, Homo Sapiens
aagtatggcatgaacatctt

SEQ ID NO: 2131 - DNA, 20 bp, Homo Sapiens
agtatggcatgaacatcttt

SEQ ID NO: 2132 - DNA, 20 bp, Homo Sapiens
gtatggcatgaacatcttta

SEQ ID NO: 2133 - DNA, 20 bp, Homo Sapiens
tatggcatgaacatctttag

SEQ ID NO: 2134 - DNA, 20 bp, Homo Sapiens
atggcatgaacatctttagg

SEQ ID NO: 2135 - DNA, 20 bp, Homo Sapiens
tggcatgaacatctttagga

SEQ ID NO: 2136 - DNA, 20 bp, Homo Sapiens
ggcatgaacatctttaggag

SEQ ID NO: 2137 - DNA, 20 bp, Homo Sapiens
gcatgaacatctttaggaga

SEQ ID NO: 2138 - DNA, 20 bp, Homo Sapiens
catgaacatctttaggagac

SEQ ID NO: 2139 - DNA, 20 bp, Homo Sapiens
atgaacatctttaggagact

SEQ ID NO: 2140 - DNA, 20 bp, Homo Sapiens
tgaacatctttaggagacta

SEQ ID NO: 2141 - DNA, 20 bp, Homo Sapiens
gaacatctttaggagactaa

SEQ ID NO: 2142 - DNA, 20 bp, Homo Sapiens
aacatctttaggagactaat

SEQ ID NO: 2143 - DNA, 20 bp, Homo Sapiens
acatctttaggagactaatg

SEQ ID NO: 2144 - DNA, 20 bp, Homo Sapiens
catctttaggagactaatgg

SEQ ID NO: 2145 - DNA, 20 bp, Homo Sapiens
atctttaggagactaatgga

SEQ ID NO: 2146 - DNA, 20 bp, Homo Sapiens
tctttaggagactaatggaa

SEQ ID NO: 2147 - DNA, 20 bp, Homo Sapiens
ctttaggagactaatggaaa

SEQ ID NO: 2148 - DNA, 20 bp, Homo Sapiens
tttaggagactaatggaaat

SEQ ID NO: 2149 - DNA, 20 bp, Homo Sapiens
ttaggagactaatggaaata

SEQ ID NO: 2150 - DNA, 20 bp, Homo Sapiens
taggagactaatggaaatat

SEQ ID NO: 2151 - DNA, 20 bp, Homo Sapiens
aggagactaatggaaatatt

SEQ ID NO: 2152 - DNA, 20 bp, Homo Sapiens
ggagactaatggaaatatta

SEQ ID NO: 2153 - DNA, 20 bp, Homo Sapiens
gagactaatggaaatattat

SEQ ID NO: 2154 - DNA, 20 bp, Homo Sapiens
agactaatggaaatattatt

SEQ ID NO: 2155 - DNA, 20 bp, Homo Sapiens
gactaatggaaatattattg

SEQ ID NO: 2156 - DNA, 20 bp, Homo Sapiens
actaatggaaatattattgg

SEQ ID NO: 2157 - DNA, 20 bp, Homo Sapiens
ctaatggaaatattattggt

SEQ ID NO: 2158 - DNA, 20 bp, Homo Sapiens
taatggaaatattattggtg

SEQ ID NO: 2159 - DNA, 20 bp, Homo Sapiens
aatggaaatattattggtgt

SEQ ID NO: 2160 - DNA, 20 bp, Homo Sapiens
atggaaatattattggtgtt

SEQ ID NO: 2161 - DNA, 20 bp, Homo Sapiens
tggaaatattattggtgttt

SEQ ID NO: 2162 - DNA, 20 bp, Homo Sapiens
ggaaatattattggtgttta

SEQ ID NO: 2163 - DNA, 20 bp, Homo Sapiens
gaaatattattggtgtttac

SEQ ID NO: 2164 - DNA, 20 bp, Homo Sapiens
aaatattattggtgtttacc

SEQ ID NO: 2165 - DNA, 20 bp, Homo Sapiens
aatattattggtgtttaccc

SEQ ID NO: 2166 - DNA, 20 bp, Homo Sapiens
atattattggtgtttaccca

SEQ ID NO: 2167 - DNA, 20 bp, Homo Sapiens
tattattggtgtttacccag

SEQ ID NO: 2168 - DNA, 20 bp, Homo Sapiens
attattggtgtttacccagt

SEQ ID NO: 2169 - DNA, 20 bp, Homo Sapiens
ttattggtgtttacccagta

SEQ ID NO: 2170 - DNA, 20 bp, Homo Sapiens
tattggtgtttacccagtat

SEQ ID NO: 2171 - DNA, 20 bp, Homo Sapiens
attggtgtttacccagtatt

SEQ ID NO: 2172 - DNA, 20 bp, Homo Sapiens
ttggtgtttacccagtattc

SEQ ID NO: 2173 - DNA, 20 bp, Homo Sapiens
tggtgtttacccagtattcc

SEQ ID NO: 2174 - DNA, 20 bp, Homo Sapiens
ggtgtttacccagtattcca

SEQ ID NO: 2175 - DNA, 20 bp, Homo Sapiens
gtgtttacccagtattccat

SEQ ID NO: 2176 - DNA, 20 bp, Homo Sapiens
tgtttacccagtattccatt

SEQ ID NO: 2177 - DNA, 20 bp, Homo Sapiens
gtttacccagtattccattt

SEQ ID NO: 2178 - DNA, 20 bp, Homo Sapiens
tttacccagtattccatttt

SEQ ID NO: 2179 - DNA, 20 bp, Homo Sapiens
ttacccagtattccattttt

SEQ ID NO: 2180 - DNA, 20 bp, Homo Sapiens
tacccagtattccatttttt

SEQ ID NO: 2181 - DNA, 20 bp, Homo Sapiens
acccagtattccattttttt

SEQ ID NO: 2182 - DNA, 20 bp, Homo Sapiens
cccagtattccatttttttc

SEQ ID NO: 2183 - DNA, 20 bp, Homo Sapiens
ccagtattccatttttttca

SEQ ID NO: 2184 - DNA, 20 bp, Homo Sapiens
cagtattccatttttttcat

SEQ ID NO: 2185 - DNA, 20 bp, Homo Sapiens
agtattccatttttttcatt

SEQ ID NO: 2186 - DNA, 20 bp, Homo Sapiens
gtattccatttttttcattg

SEQ ID NO: 2187 - DNA, 20 bp, Homo Sapiens
tattccatttttttcattgt

SEQ ID NO: 2188 - DNA, 20 bp, Homo Sapiens
attccatttttttcattgtg

SEQ ID NO: 2189 - DNA, 20 bp, Homo Sapiens
ttccatttttttcattgtgt

SEQ ID NO: 2190 - DNA, 20 bp, Homo Sapiens
tccatttttttcattgtgtt

SEQ ID NO: 2191 - DNA, 20 bp, Homo Sapiens
ccatttttttcattgtgttc

SEQ ID NO: 2192 - DNA, 20 bp, Homo Sapiens
catttttttcattgtgttct

SEQ ID NO: 2193 - DNA, 20 bp, Homo Sapiens
atttttttcattgtgttctc

SEQ ID NO: 2194 - DNA, 20 bp, Homo Sapiens
tttttttcattgtgttctct

SEQ ID NO: 2195 - DNA, 20 bp, Homo Sapiens
ttttttcattgtgttctcta

SEQ ID NO: 2196 - DNA, 20 bp, Homo Sapiens
tttttcattgtgttctctat

SEQ ID NO: 2197 - DNA, 20 bp, Homo Sapiens
ttttcattgtgttctctatt

SEQ ID NO: 2198 - DNA, 20 bp, Homo Sapiens
tttcattgtgttctctattg

SEQ ID NO: 2199 - DNA, 20 bp, Homo Sapiens
ttcattgtgttctctattgc

SEQ ID NO: 2200 - DNA, 20 bp, Homo Sapiens
tcattgtgttctctattgct

SEQ ID NO: 2201 - DNA, 20 bp, Homo Sapiens
cattgtgttctctattgctg

SEQ ID NO: 2202 - DNA, 20 bp, Homo Sapiens
attgtgttctctattgctgc

SEQ ID NO: 2203 - DNA, 20 bp, Homo Sapiens
ttgtgttctctattgctgct

SEQ ID NO: 2204 - DNA, 20 bp, Homo Sapiens
tgtgttctctattgctgctc

SEQ ID NO: 2205 - DNA, 20 bp, Homo Sapiens
gtgttctctattgctgctct

SEQ ID NO: 2206 - DNA, 20 bp, Homo Sapiens
tgttctctattgctgctctc

SEQ ID NO: 2207 - DNA, 20 bp, Homo Sapiens
gttctctattgctgctctct

SEQ ID NO: 2208 - DNA, 20 bp, Homo Sapiens
ttctctattgctgctctctc

SEQ ID NO: 2209 - DNA, 20 bp, Homo Sapiens
tctctattgctgctctctca

SEQ ID NO: 2210 - DNA, 20 bp, Homo Sapiens
ctctattgctgctctctcac

SEQ ID NO: 2211 - DNA, 20 bp, Homo Sapiens
tctattgctgctctctcact

SEQ ID NO: 2212 - DNA, 20 bp, Homo Sapiens
ctattgctgctctctcactc

SEQ ID NO: 2213 - DNA, 20 bp, Homo Sapiens
tattgctgctctctcactcc

SEQ ID NO: 2214 - DNA, 20 bp, Homo Sapiens
attgctgctctctcactccc

SEQ ID NO: 2215 - DNA, 20 bp, Homo Sapiens
ttgctgctctctcactcccc

SEQ ID NO: 2216 - DNA, 20 bp, Homo Sapiens
tgctgctctctcactccccc

SEQ ID NO: 2217 - DNA, 20 bp, Homo Sapiens
gctgctctctcactccccca

SEQ ID NO: 2218 - DNA, 20 bp, Homo Sapiens
ctgctctctcactcccccat

SEQ ID NO: 2219 - DNA, 20 bp, Homo Sapiens
tgctctctcactcccccatg

SEQ ID NO: 2220 - DNA, 20 bp, Homo Sapiens
gctctctcactcccccatga

SEQ ID NO: 2221 - DNA, 20 bp, Homo Sapiens
ctctctcactcccccatgag

SEQ ID NO: 2222 - DNA, 20 bp, Homo Sapiens
tctctcactcccccatgagg

SEQ ID NO: 2223 - DNA, 20 bp, Homo Sapiens
ctctcactcccccatgaggt

SEQ ID NO: 2224 - DNA, 20 bp, Homo Sapiens
tctcactcccccatgaggta

SEQ ID NO: 2225 - DNA, 20 bp, Homo Sapiens
ctcactcccccatgaggtac

SEQ ID NO: 2226 - DNA, 20 bp, Homo Sapiens
tcactcccccatgaggtaca

SEQ ID NO: 2227 - DNA, 20 bp, Homo Sapiens
cactcccccatgaggtacag

SEQ ID NO: 2228 - DNA, 20 bp, Homo Sapiens
actcccccatgaggtacagc

SEQ ID NO: 2229 - DNA, 20 bp, Homo Sapiens
ctcccccatgaggtacagca

SEQ ID NO: 2230 - DNA, 20 bp, Homo Sapiens
tcccccatgaggtacagcag

SEQ ID NO: 2231 - DNA, 20 bp, Homo Sapiens
cccccatgaggtacagcaga

SEQ ID NO: 2232 - DNA, 20 bp, Homo Sapiens
ccccatgaggtacagcagaa

SEQ ID NO: 2233 - DNA, 20 bp, Homo Sapiens
cccatgaggtacagcagaaa

SEQ ID NO: 2234 - DNA, 20 bp, Homo Sapiens
ccatgaggtacagcagaaag

SEQ ID NO: 2235 - DNA, 20 bp, Homo Sapiens
catgaggtacagcagaaagg

SEQ ID NO: 2236 - DNA, 20 bp, Homo Sapiens
atgaggtacagcagaaagga

SEQ ID NO: 2237 - DNA, 20 bp, Homo Sapiens
tgaggtacagcagaaaggag

SEQ ID NO: 2238 - DNA, 20 bp, Homo Sapiens
gaggtacagcagaaaggaga

SEQ ID NO: 2239 - DNA, 20 bp, Homo Sapiens
aggtacagcagaaaggagaa

SEQ ID NO: 2240 - DNA, 20 bp, Homo Sapiens
ggtacagcagaaaggagaac

SEQ ID NO: 2241 - DNA, 20 bp, Homo Sapiens
gtacagcagaaaggagaact

SEQ ID NO: 2242 - DNA, 20 bp, Homo Sapiens
tacagcagaaaggagaacta

SEQ ID NO: 2243 - DNA, 20 bp, Homo Sapiens
acagcagaaaggagaactat

SEQ ID NO: 2244 - DNA, 20 bp, Homo Sapiens
cagcagaaaggagaactatc

SEQ ID NO: 2245 - DNA, 20 bp, Homo Sapiens
agcagaaaggagaactatcc

SEQ ID NO: 2246 - DNA, 20 bp, Homo Sapiens
gcagaaaggagaactatcca

SEQ ID NO: 2247 - DNA, 20 bp, Homo Sapiens
cagaaaggagaactatccaa

SEQ ID NO: 2248 - DNA, 20 bp, Homo Sapiens
agaaaggagaactatccaaa

SEQ ID NO: 2249 - DNA, 20 bp, Homo Sapiens
gaaaggagaactatccaaaa

SEQ ID NO: 2250 - DNA, 20 bp, Homo Sapiens
aaaggagaactatccaaaac

SEQ ID NO: 2251 - DNA, 20 bp, Homo Sapiens
aaggagaactatccaaaact

SEQ ID NO: 2252 - DNA, 20 bp, Homo Sapiens
aggagaactatccaaaacta

SEQ ID NO: 2253 - DNA, 20 bp, Homo Sapiens
ggagaactatccaaaactaa

SEQ ID NO: 2254 - DNA, 20 bp, Homo Sapiens
gagaactatccaaaactaat

SEQ ID NO: 2255 - DNA, 20 bp, Homo Sapiens
agaactatccaaaactaatt

SEQ ID NO: 2256 - DNA, 20 bp, Homo Sapiens
gaactatccaaaactaattt

SEQ ID NO: 2257 - DNA, 20 bp, Homo Sapiens
aactatccaaaactaatttc

SEQ ID NO: 2258 - DNA, 20 bp, Homo Sapiens
actatccaaaactaatttcc

SEQ ID NO: 2259 - DNA, 20 bp, Homo Sapiens
ctatccaaaactaatttcct

SEQ ID NO: 2260 - DNA, 20 bp, Homo Sapiens
tatccaaaactaatttcctc

SEQ ID NO: 2261 - DNA, 20 bp, Homo Sapiens
atccaaaactaatttcctct

SEQ ID NO: 2262 - DNA, 20 bp, Homo Sapiens
tccaaaactaatttcctctg

SEQ ID NO: 2263 - DNA, 20 bp, Homo Sapiens
ccaaaactaatttcctctga

SEQ ID NO: 2264 - DNA, 20 bp, Homo Sapiens
caaaactaatttcctctgac

SEQ ID NO: 2265 - DNA, 20 bp, Homo Sapiens
aaaactaatttcctctgaca

SEQ ID NO: 2266 - DNA, 20 bp, Homo Sapiens
aaactaatttcctctgacat

SEQ ID NO: 2267 - DNA, 20 bp, Homo Sapiens
aactaatttcctctgacatg

SEQ ID NO: 2268 - DNA, 20 bp, Homo Sapiens
actaatttcctctgacatgt

SEQ ID NO: 2269 - DNA, 20 bp, Homo Sapiens
ctaatttcctctgacatgta

SEQ ID NO: 2270 - DNA, 20 bp, Homo Sapiens
taatttcctctgacatgtaa

SEQ ID NO: 2271 - DNA, 20 bp, Homo Sapiens
aatttcctctgacatgtaag

SEQ ID NO: 2272 - DNA, 20 bp, Homo Sapiens
atttcctctgacatgtaaga

SEQ ID NO: 2273 - DNA, 20 bp, Homo Sapiens
tttcctctgacatgtaagac

SEQ ID NO: 2274 - DNA, 20 bp, Homo Sapiens
ttcctctgacatgtaagacg

SEQ ID NO: 2275 - DNA, 20 bp, Homo Sapiens
tcctctgacatgtaagacga

SEQ ID NO: 2276 - DNA, 20 bp, Homo Sapiens
cctctgacatgtaagacgaa

SEQ ID NO: 2277 - DNA, 20 bp, Homo Sapiens
ctctgacatgtaagacgaat

SEQ ID NO: 2278 - DNA, 20 bp, Homo Sapiens
tctgacatgtaagacgaatg

SEQ ID NO: 2279 - DNA, 20 bp, Homo Sapiens
ctgacatgtaagacgaatga

SEQ ID NO: 2280 - DNA, 20 bp, Homo Sapiens
tgacatgtaagacgaatgat

SEQ ID NO: 2281 - DNA, 20 bp, Homo Sapiens
gacatgtaagacgaatgatt

SEQ ID NO: 2282 - DNA, 20 bp, Homo Sapiens
acatgtaagacgaatgattt

SEQ ID NO: 2283 - DNA, 20 bp, Homo Sapiens
catgtaagacgaatgattta

SEQ ID NO: 2284 - DNA, 20 bp, Homo Sapiens
atgtaagacgaatgatttag

SEQ ID NO: 2285 - DNA, 20 bp, Homo Sapiens
tgtaagacgaatgatttagg

SEQ ID NO: 2286 - DNA, 20 bp, Homo Sapiens
gtaagacgaatgatttaggt

SEQ ID NO: 2287 - DNA, 20 bp, Homo Sapiens
taagacgaatgatttaggta

SEQ ID NO: 2288 - DNA, 20 bp, Homo Sapiens
aagacgaatgatttaggtac

SEQ ID NO: 2289 - DNA, 20 bp, Homo Sapiens
agacgaatgatttaggtacg

SEQ ID NO: 2290 - DNA, 20 bp, Homo Sapiens
gacgaatgatttaggtacgt

SEQ ID NO: 2291 - DNA, 20 bp, Homo Sapiens
acgaatgatttaggtacgtc

SEQ ID NO: 2292 - DNA, 20 bp, Homo Sapiens
cgaatgatttaggtacgtca

SEQ ID NO: 2293 - DNA, 20 bp, Homo Sapiens
gaatgatttaggtacgtcaa

SEQ ID NO: 2294 - DNA, 20 bp, Homo Sapiens
aatgatttaggtacgtcaaa

SEQ ID NO: 2295 - DNA, 20 bp, Homo Sapiens
atgatttaggtacgtcaaag

SEQ ID NO: 2296 - DNA, 20 bp, Homo Sapiens
tgatttaggtacgtcaaagc

SEQ ID NO: 2297 - DNA, 20 bp, Homo Sapiens
gatttaggtacgtcaaagca

SEQ ID NO: 2298 - DNA, 20 bp, Homo Sapiens
atttaggtacgtcaaagcag

SEQ ID NO: 2299 - DNA, 20 bp, Homo Sapiens
tttaggtacgtcaaagcagt

SEQ ID NO: 2300 - DNA, 20 bp, Homo Sapiens
ttaggtacgtcaaagcagta

SEQ ID NO: 2301 - DNA, 20 bp, Homo Sapiens
taggtacgtcaaagcagtag

SEQ ID NO: 2302 - DNA, 20 bp, Homo Sapiens
aggtacgtcaaagcagtagt

SEQ ID NO: 2303 - DNA, 20 bp, Homo Sapiens
ggtacgtcaaagcagtagtc

SEQ ID NO: 2304 - DNA, 20 bp, Homo Sapiens
gtacgtcaaagcagtagtca

SEQ ID NO: 2305 - DNA, 20 bp, Homo Sapiens
tacgtcaaagcagtagtcaa

SEQ ID NO: 2306 - DNA, 20 bp, Homo Sapiens
acgtcaaagcagtagtcaag

SEQ ID NO: 2307 - DNA, 20 bp, Homo Sapiens
cgtcaaagcagtagtcaagg

SEQ ID NO: 2308 - DNA, 20 bp, Homo Sapiens
gtcaaagcagtagtcaagga

SEQ ID NO: 2309 - DNA, 20 bp, Homo Sapiens
tcaaagcagtagtcaaggag

SEQ ID NO: 2310 - DNA, 20 bp, Homo Sapiens
caaagcagtagtcaaggagg

SEQ ID NO: 2311 - DNA, 20 bp, Homo Sapiens
aaagcagtagtcaaggagga

SEQ ID NO: 2312 - DNA, 20 bp, Homo Sapiens
aagcagtagtcaaggaggaa

SEQ ID NO: 2313 - DNA, 20 bp, Homo Sapiens
agcagtagtcaaggaggaaa

SEQ ID NO: 2314 - DNA, 20 bp, Homo Sapiens
gcagtagtcaaggaggaaag

SEQ ID NO: 2315 - DNA, 20 bp, Homo Sapiens
cagtagtcaaggaggaaagg

SEQ ID NO: 2316 - DNA, 20 bp, Homo Sapiens
agtagtcaaggaggaaaggg

SEQ ID NO: 2317 - DNA, 20 bp, Homo Sapiens
gtagtcaaggaggaaaggga

SEQ ID NO: 2318 - DNA, 20 bp, Homo Sapiens
tagtcaaggaggaaagggat

SEQ ID NO: 2319 - DNA, 20 bp, Homo Sapiens
agtcaaggaggaaagggata

SEQ ID NO: 2320 - DNA, 20 bp, Homo Sapiens
gtcaaggaggaaagggatag

SEQ ID NO: 2321 - DNA, 20 bp, Homo Sapiens
tcaaggaggaaagggatagt

SEQ ID NO: 2322 - DNA, 20 bp, Homo Sapiens
caaggaggaaagggatagtc

SEQ ID NO: 2323 - DNA, 20 bp, Homo Sapiens
aaggaggaaagggatagtcc

SEQ ID NO: 2324 - DNA, 20 bp, Homo Sapiens
aggaggaaagggatagtcca

SEQ ID NO: 2325 - DNA, 20 bp, Homo Sapiens
ggaggaaagggatagtccaa

SEQ ID NO: 2326 - DNA, 20 bp, Homo Sapiens
gaggaaagggatagtccaaa

SEQ ID NO: 2327 - DNA, 20 bp, Homo Sapiens
aggaaagggatagtccaaag

SEQ ID NO: 2328 - DNA, 20 bp, Homo Sapiens
ggaaagggatagtccaaaga

SEQ ID NO: 2329 - DNA, 20 bp, Homo Sapiens
gaaagggatagtccaaagac

SEQ ID NO: 2330 - DNA, 20 bp, Homo Sapiens
aaagggatagtccaaagact

SEQ ID NO: 2331 - DNA, 20 bp, Homo Sapiens
aagggatagtccaaagactt

SEQ ID NO: 2332 - DNA, 20 bp, Homo Sapiens
agggatagtccaaagactta

SEQ ID NO: 2333 - DNA, 20 bp, Homo Sapiens
gggatagtccaaagacttaa

SEQ ID NO: 2334 - DNA, 20 bp, Homo Sapiens
ggatagtccaaagacttaac

SEQ ID NO: 2335 - DNA, 20 bp, Homo Sapiens
gatagtccaaagacttaact

SEQ ID NO: 2336 - DNA, 20 bp, Homo Sapiens
atagtccaaagacttaactg

SEQ ID NO: 2337 - DNA, 20 bp, Homo Sapiens
tagtccaaagacttaactgg

SEQ ID NO: 2338 - DNA, 20 bp, Homo Sapiens
agtccaaagacttaactggt

SEQ ID NO: 2339 - DNA, 20 bp, Homo Sapiens
gtccaaagacttaactggtt

SEQ ID NO: 2340 - DNA, 20 bp, Homo Sapiens
tccaaagacttaactggttc

SEQ ID NO: 2341 - DNA, 20 bp, Homo Sapiens
ccaaagacttaactggttca

SEQ ID NO: 2342 - DNA, 20 bp, Homo Sapiens
caaagacttaactggttcat

SEQ ID NO: 2343 - DNA, 20 bp, Homo Sapiens
aaagacttaactggttcata

SEQ ID NO: 2344 - DNA, 20 bp, Homo Sapiens
aagacttaactggttcatat

SEQ ID NO: 2345 - DNA, 20 bp, Homo Sapiens
agacttaactggttcatatt

SEQ ID NO: 2346 - DNA, 20 bp, Homo Sapiens
gacttaactggttcatattg

SEQ ID NO: 2347 - DNA, 20 bp, Homo Sapiens
acttaactggttcatattgg

SEQ ID NO: 2348 - DNA, 20 bp, Homo Sapiens
cttaactggttcatattgga

SEQ ID NO: 2349 - DNA, 20 bp, Homo Sapiens
ttaactggttcatattggac

SEQ ID NO: 2350 - DNA, 20 bp, Homo Sapiens
taactggttcatattggact

SEQ ID NO: 2351 - DNA, 20 bp, Homo Sapiens
aactggttcatattggactg

SEQ ID NO: 2352 - DNA, 20 bp, Homo Sapiens
actggttcatattggactga

SEQ ID NO: 2353 - DNA, 20 bp, Homo Sapiens
ctggttcatattggactgat

SEQ ID NO: 2354 - DNA, 20 bp, Homo Sapiens
tggttcatattggactgata

SEQ ID NO: 2355 - DNA, 20 bp, Homo Sapiens
ggttcatattggactgataa

SEQ ID NO: 2356 - DNA, 20 bp, Homo Sapiens
gttcatattggactgataat

SEQ ID NO: 2357 - DNA, 20 bp, Homo Sapiens
ttcatattggactgataatc

SEQ ID NO: 2358 - DNA, 20 bp, Homo Sapiens
tcatattggactgataatct

SEQ ID NO: 2359 - DNA, 20 bp, Homo Sapiens
catattggactgataatctc

SEQ ID NO: 2360 - DNA, 20 bp, Homo Sapiens
atattggactgataatctct

SEQ ID NO: 2361 - DNA, 20 bp, Homo Sapiens
tattggactgataatctctt

SEQ ID NO: 2362 - DNA, 20 bp, Homo Sapiens
attggactgataatctcttt

SEQ ID NO: 2363 - DNA, 20 bp, Homo Sapiens
ttggactgataatctcttta

SEQ ID NO: 2364 - DNA, 20 bp, Homo Sapiens
tggactgataatctctttaa

SEQ ID NO: 2365 - DNA, 20 bp, Homo Sapiens
ggactgataatctctttaaa

SEQ ID NO: 2366 - DNA, 20 bp, Homo Sapiens
gactgataatctctttaaat

SEQ ID NO: 2367 - DNA, 20 bp, Homo Sapiens
actgataatctctttaaatg

SEQ ID NO: 2368 - DNA, 20 bp, Homo Sapiens
ctgataatctctttaaatgg

SEQ ID NO: 2369 - DNA, 20 bp, Homo Sapiens
tgataatctctttaaatggc

SEQ ID NO: 2370 - DNA, 20 bp, Homo Sapiens
gataatctctttaaatggct

SEQ ID NO: 2371 - DNA, 20 bp, Homo Sapiens
ataatctctttaaatggctt

SEQ ID NO: 2372 - DNA, 20 bp, Homo Sapiens
taatctctttaaatggcttt

SEQ ID NO: 2373 - DNA, 20 bp, Homo Sapiens
aatctctttaaatggcttta

SEQ ID NO: 2374 - DNA, 20 bp, Homo Sapiens
atctctttaaatggctttat

SEQ ID NO: 2375 - DNA, 20 bp, Homo Sapiens
tctctttaaatggctttatg

SEQ ID NO: 2376 - DNA, 20 bp, Homo Sapiens
ctctttaaatggctttatgc

SEQ ID NO: 2377 - DNA, 20 bp, Homo Sapiens
tctttaaatggctttatgct

SEQ ID NO: 2378 - DNA, 20 bp, Homo Sapiens
ctttaaatggctttatgcta

SEQ ID NO: 2379 - DNA, 20 bp, Homo Sapiens
tttaaatggctttatgctag

SEQ ID NO: 2380 - DNA, 20 bp, Homo Sapiens
ttaaatggctttatgctagt

SEQ ID NO: 2381 - DNA, 20 bp, Homo Sapiens
taaatggctttatgctagtt

SEQ ID NO: 2382 - DNA, 20 bp, Homo Sapiens
aaatggctttatgctagttt

SEQ ID NO: 2383 - DNA, 20 bp, Homo Sapiens
aatggctttatgctagtttg

SEQ ID NO: 2384 - DNA, 20 bp, Homo Sapiens
atggctttatgctagtttga

SEQ ID NO: 2385 - DNA, 20 bp, Homo Sapiens
tggctttatgctagtttgac

SEQ ID NO: 2386 - DNA, 20 bp, Homo Sapiens
ggctttatgctagtttgacc

SEQ ID NO: 2387 - DNA, 20 bp, Homo Sapiens
gctttatgctagtttgacct

SEQ ID NO: 2388 - DNA, 20 bp, Homo Sapiens
ctttatgctagtttgacctc

SEQ ID NO: 2389 - DNA, 20 bp, Homo Sapiens
tttatgctagtttgacctca

SEQ ID NO: 2390 - DNA, 20 bp, Homo Sapiens
ttatgctagtttgacctcat

SEQ ID NO: 2391 - DNA, 20 bp, Homo Sapiens
tatgctagtttgacctcatt

SEQ ID NO: 2392 - DNA, 20 bp, Homo Sapiens
atgctagtttgacctcattt

SEQ ID NO: 2393 - DNA, 20 bp, Homo Sapiens
tgctagtttgacctcatttg

SEQ ID NO: 2394 - DNA, 20 bp, Homo Sapiens
gctagtttgacctcatttgt

SEQ ID NO: 2395 - DNA, 20 bp, Homo Sapiens
ctagtttgacctcatttgta

SEQ ID NO: 2396 - DNA, 20 bp, Homo Sapiens
tagtttgacctcatttgtaa

SEQ ID NO: 2397 - DNA, 20 bp, Homo Sapiens
agtttgacctcatttgtaaa

SEQ ID NO: 2398 - DNA, 20 bp, Homo Sapiens
gtttgacctcatttgtaaaa

SEQ ID NO: 2399 - DNA, 20 bp, Homo Sapiens
tttgacctcatttgtaaaat

SEQ ID NO: 2400 - DNA, 20 bp, Homo Sapiens
ttgacctcatttgtaaaata

SEQ ID NO: 2401 - DNA, 20 bp, Homo Sapiens
tgacctcatttgtaaaatat

SEQ ID NO: 2402 - DNA, 20 bp, Homo Sapiens
gacctcatttgtaaaatatt

SEQ ID NO: 2403 - DNA, 20 bp, Homo Sapiens
acctcatttgtaaaatattt

SEQ ID NO: 2404 - DNA, 20 bp, Homo Sapiens
cctcatttgtaaaatattta

SEQ ID NO: 2405 - DNA, 20 bp, Homo Sapiens
ctcatttgtaaaatatttat

SEQ ID NO: 2406 - DNA, 20 bp, Homo Sapiens
tcatttgtaaaatatttatg

SEQ ID NO: 2407 - DNA, 20 bp, Homo Sapiens
catttgtaaaatatttatga

SEQ ID NO: 2408 - DNA, 20 bp, Homo Sapiens
atttgtaaaatatttatgag

SEQ ID NO: 2409 - DNA, 20 bp, Homo Sapiens
tttgtaaaatatttatgaga

SEQ ID NO: 2410 - DNA, 20 bp, Homo Sapiens
ttgtaaaatatttatgagaa

SEQ ID NO: 2411 - DNA, 20 bp, Homo Sapiens
tgtaaaatatttatgagaaa

SEQ ID NO: 2412 - DNA, 20 bp, Homo Sapiens
gtaaaatatttatgagaaag

SEQ ID NO: 2413 - DNA, 20 bp, Homo Sapiens
taaaatatttatgagaaagt

SEQ ID NO: 2414 - DNA, 20 bp, Homo Sapiens
aaaatatttatgagaaagtt

SEQ ID NO: 2415 - DNA, 20 bp, Homo Sapiens
aaatatttatgagaaagttc

SEQ ID NO: 2416 - DNA, 20 bp, Homo Sapiens
aatatttatgagaaagttct

SEQ ID NO: 2417 - DNA, 20 bp, Homo Sapiens
atatttatgagaaagttctc

SEQ ID NO: 2418 - DNA, 20 bp, Homo Sapiens
tatttatgagaaagttctca

SEQ ID NO: 2419 - DNA, 20 bp, Homo Sapiens
atttatgagaaagttctcat

SEQ ID NO: 2420 - DNA, 20 bp, Homo Sapiens
tttatgagaaagttctcatt

SEQ ID NO: 2421 - DNA, 20 bp, Homo Sapiens
ttatgagaaagttctcattt

SEQ ID NO: 2422 - DNA, 20 bp, Homo Sapiens
tatgagaaagttctcattta

SEQ ID NO: 2423 - DNA, 20 bp, Homo Sapiens
atgagaaagttctcatttaa

SEQ ID NO: 2424 - DNA, 20 bp, Homo Sapiens
tgagaaagttctcatttaaa

SEQ ID NO: 2425 - DNA, 20 bp, Homo Sapiens
gagaaagttctcatttaaaa

SEQ ID NO: 2426 - DNA, 20 bp, Homo Sapiens
agaaagttctcatttaaaat

SEQ ID NO: 2427 - DNA, 20 bp, Homo Sapiens
gaaagttctcatttaaaatg

SEQ ID NO: 2428 - DNA, 20 bp, Homo Sapiens
aaagttctcatttaaaatga

SEQ ID NO: 2429 - DNA, 20 bp, Homo Sapiens
aagttctcatttaaaatgag

SEQ ID NO: 2430 - DNA, 20 bp, Homo Sapiens
agttctcatttaaaatgaga

SEQ ID NO: 2431 - DNA, 20 bp, Homo Sapiens
gttctcatttaaaatgagat

SEQ ID NO: 2432 - DNA, 20 bp, Homo Sapiens
ttctcatttaaaatgagatc

SEQ ID NO: 2433 - DNA, 20 bp, Homo Sapiens
tctcatttaaaatgagatcg

SEQ ID NO: 2434 - DNA, 20 bp, Homo Sapiens
ctcatttaaaatgagatcgt

SEQ ID NO: 2435 - DNA, 20 bp, Homo Sapiens
tcatttaaaatgagatcgtt

SEQ ID NO: 2436 - DNA, 20 bp, Homo Sapiens
catttaaaatgagatcgttg

SEQ ID NO: 2437 - DNA, 20 bp, Homo Sapiens
atttaaaatgagatcgttgt

SEQ ID NO: 2438 - DNA, 20 bp, Homo Sapiens
tttaaaatgagatcgttgtt

SEQ ID NO: 2439 - DNA, 20 bp, Homo Sapiens
ttaaaatgagatcgttgttt

SEQ ID NO: 2440 - DNA, 20 bp, Homo Sapiens
taaaatgagatcgttgttta

SEQ ID NO: 2441 - DNA, 20 bp, Homo Sapiens
aaaatgagatcgttgtttac

SEQ ID NO: 2442 - DNA, 20 bp, Homo Sapiens
aaatgagatcgttgtttaca

SEQ ID NO: 2443 - DNA, 20 bp, Homo Sapiens
aatgagatcgttgtttacag

SEQ ID NO: 2444 - DNA, 20 bp, Homo Sapiens
atgagatcgttgtttacagt

SEQ ID NO: 2445 - DNA, 20 bp, Homo Sapiens
tgagatcgttgtttacagtg

SEQ ID NO: 2446 - DNA, 20 bp, Homo Sapiens
gagatcgttgtttacagtgt

SEQ ID NO: 2447 - DNA, 20 bp, Homo Sapiens
agatcgttgtttacagtgta

SEQ ID NO: 2448 - DNA, 20 bp, Homo Sapiens
gatcgttgtttacagtgtat

SEQ ID NO: 2449 - DNA, 20 bp, Homo Sapiens
atcgttgtttacagtgtatg

SEQ ID NO: 2450 - DNA, 20 bp, Homo Sapiens
tcgttgtttacagtgtatgt

SEQ ID NO: 2451 - DNA, 20 bp, Homo Sapiens
cgttgtttacagtgtatgta

SEQ ID NO: 2452 - DNA, 20 bp, Homo Sapiens
gttgtttacagtgtatgtac

SEQ ID NO: 2453 - DNA, 20 bp, Homo Sapiens
ttgtttacagtgtatgtact

SEQ ID NO: 2454 - DNA, 20 bp, Homo Sapiens
tgtttacagtgtatgtacta

SEQ ID NO: 2455 - DNA, 20 bp, Homo Sapiens
gtttacagtgtatgtactaa

SEQ ID NO: 2456 - DNA, 20 bp, Homo Sapiens
tttacagtgtatgtactaag

SEQ ID NO: 2457 - DNA, 20 bp, Homo Sapiens
ttacagtgtatgtactaagc

SEQ ID NO: 2458 - DNA, 20 bp, Homo Sapiens
tacagtgtatgtactaagca

SEQ ID NO: 2459 - DNA, 20 bp, Homo Sapiens
acagtgtatgtactaagcag

SEQ ID NO: 2460 - DNA, 20 bp, Homo Sapiens
cagtgtatgtactaagcagt

SEQ ID NO: 2461 - DNA, 20 bp, Homo Sapiens
agtgtatgtactaagcagta

SEQ ID NO: 2462 - DNA, 20 bp, Homo Sapiens
gtgtatgtactaagcagtaa

SEQ ID NO: 2463 - DNA, 20 bp, Homo Sapiens
tgtatgtactaagcagtaag

SEQ ID NO: 2464 - DNA, 20 bp, Homo Sapiens
gtatgtactaagcagtaagc

SEQ ID NO: 2465 - DNA, 20 bp, Homo Sapiens
tatgtactaagcagtaagct

SEQ ID NO: 2466 - DNA, 20 bp, Homo Sapiens
atgtactaagcagtaagcta

SEQ ID NO: 2467 - DNA, 20 bp, Homo Sapiens
tgtactaagcagtaagctat

SEQ ID NO: 2468 - DNA, 20 bp, Homo Sapiens
gtactaagcagtaagctatc

SEQ ID NO: 2469 - DNA, 20 bp, Homo Sapiens
tactaagcagtaagctatct

SEQ ID NO: 2470 - DNA, 20 bp, Homo Sapiens
actaagcagtaagctatctt

SEQ ID NO: 2471 - DNA, 20 bp, Homo Sapiens
ctaagcagtaagctatcttc

SEQ ID NO: 2472 - DNA, 20 bp, Homo Sapiens
taagcagtaagctatcttca

SEQ ID NO: 2473 - DNA, 20 bp, Homo Sapiens
aagcagtaagctatcttcaa

SEQ ID NO: 2474 - DNA, 20 bp, Homo Sapiens
agcagtaagctatcttcaaa

SEQ ID NO: 2475 - DNA, 20 bp, Homo Sapiens
gcagtaagctatcttcaaat

SEQ ID NO: 2476 - DNA, 20 bp, Homo Sapiens
cagtaagctatcttcaaatg

SEQ ID NO: 2477 - DNA, 20 bp, Homo Sapiens
agtaagctatcttcaaatgt

SEQ ID NO: 2478 - DNA, 20 bp, Homo Sapiens
gtaagctatcttcaaatgtc

SEQ ID NO: 2479 - DNA, 20 bp, Homo Sapiens
taagctatcttcaaatgtct

SEQ ID NO: 2480 - DNA, 20 bp, Homo Sapiens
aagctatcttcaaatgtcta

SEQ ID NO: 2481 - DNA, 20 bp, Homo Sapiens
agctatcttcaaatgtctaa

SEQ ID NO: 2482 - DNA, 20 bp, Homo Sapiens
gctatcttcaaatgtctaag

SEQ ID NO: 2483 - DNA, 20 bp, Homo Sapiens
ctatcttcaaatgtctaagg

SEQ ID NO: 2484 - DNA, 20 bp, Homo Sapiens
tatcttcaaatgtctaaggt

SEQ ID NO: 2485 - DNA, 20 bp, Homo Sapiens
atcttcaaatgtctaaggta

SEQ ID NO: 2486 - DNA, 20 bp, Homo Sapiens
tcttcaaatgtctaaggtag

SEQ ID NO: 2487 - DNA, 20 bp, Homo Sapiens
cttcaaatgtctaaggtagt

SEQ ID NO: 2488 - DNA, 20 bp, Homo Sapiens
ttcaaatgtctaaggtagta

SEQ ID NO: 2489 - DNA, 20 bp, Homo Sapiens
tcaaatgtctaaggtagtaa

SEQ ID NO: 2490 - DNA, 20 bp, Homo Sapiens
caaatgtctaaggtagtaac

SEQ ID NO: 2491 - DNA, 20 bp, Homo Sapiens
aaatgtctaaggtagtaact

SEQ ID NO: 2492 - DNA, 20 bp, Homo Sapiens
aatgtctaaggtagtaactt

SEQ ID NO: 2493 - DNA, 20 bp, Homo Sapiens
atgtctaaggtagtaacttt

SEQ ID NO: 2494 - DNA, 20 bp, Homo Sapiens
tgtctaaggtagtaactttc

SEQ ID NO: 2495 - DNA, 20 bp, Homo Sapiens
gtctaaggtagtaactttcc

SEQ ID NO: 2496 - DNA, 20 bp, Homo Sapiens
tctaaggtagtaactttcca

SEQ ID NO: 2497 - DNA, 20 bp, Homo Sapiens
ctaaggtagtaactttccat

SEQ ID NO: 2498 - DNA, 20 bp, Homo Sapiens
taaggtagtaactttccata

SEQ ID NO: 2499 - DNA, 20 bp, Homo Sapiens
aaggtagtaactttccatag

SEQ ID NO: 2500 - DNA, 20 bp, Homo Sapiens
aggtagtaactttccatagg

SEQ ID NO: 2501 - DNA, 20 bp, Homo Sapiens
ggtagtaactttccataggg

SEQ ID NO: 2502 - DNA, 20 bp, Homo Sapiens
gtagtaactttccatagggc

SEQ ID NO: 2503 - DNA, 20 bp, Homo Sapiens
tagtaactttccatagggcc

SEQ ID NO: 2504 - DNA, 20 bp, Homo Sapiens
agtaactttccatagggcct

SEQ ID NO: 2505 - DNA, 20 bp, Homo Sapiens
gtaactttccatagggcctc

SEQ ID NO: 2506 - DNA, 20 bp, Homo Sapiens
taactttccatagggcctcc

SEQ ID NO: 2507 - DNA, 20 bp, Homo Sapiens
aactttccatagggcctcct

SEQ ID NO: 2508 - DNA, 20 bp, Homo Sapiens
actttccatagggcctcctt

SEQ ID NO: 2509 - DNA, 20 bp, Homo Sapiens
ctttccatagggcctcctta

SEQ ID NO: 2510 - DNA, 20 bp, Homo Sapiens
tttccatagggcctccttag

SEQ ID NO: 2511 - DNA, 20 bp, Homo Sapiens
ttccatagggcctccttaga

SEQ ID NO: 2512 - DNA, 20 bp, Homo Sapiens
tccatagggcctccttagat

SEQ ID NO: 2513 - DNA, 20 bp, Homo Sapiens
ccatagggcctccttagatc

SEQ ID NO: 2514 - DNA, 20 bp, Homo Sapiens
catagggcctccttagatcc

SEQ ID NO: 2515 - DNA, 20 bp, Homo Sapiens
atagggcctccttagatccc

SEQ ID NO: 2516 - DNA, 20 bp, Homo Sapiens
tagggcctccttagatccct

SEQ ID NO: 2517 - DNA, 20 bp, Homo Sapiens
agggcctccttagatcccta

SEQ ID NO: 2518 - DNA, 20 bp, Homo Sapiens
gggcctccttagatccctaa

SEQ ID NO: 2519 - DNA, 20 bp, Homo Sapiens
ggcctccttagatccctaag

SEQ ID NO: 2520 - DNA, 20 bp, Homo Sapiens
gcctccttagatccctaaga

SEQ ID NO: 2521 - DNA, 20 bp, Homo Sapiens
cctccttagatccctaagat

SEQ ID NO: 2522 - DNA, 20 bp, Homo Sapiens
ctccttagatccctaagatg

SEQ ID NO: 2523 - DNA, 20 bp, Homo Sapiens
tccttagatccctaagatgg

SEQ ID NO: 2524 - DNA, 20 bp, Homo Sapiens
ccttagatccctaagatggc

SEQ ID NO: 2525 - DNA, 20 bp, Homo Sapiens
cttagatccctaagatggct

SEQ ID NO: 2526 - DNA, 20 bp, Homo Sapiens
ttagatccctaagatggctt

SEQ ID NO: 2527 - DNA, 20 bp, Homo Sapiens
tagatccctaagatggcttt

SEQ ID NO: 2528 - DNA, 20 bp, Homo Sapiens
agatccctaagatggctttt

SEQ ID NO: 2529 - DNA, 20 bp, Homo Sapiens
gatccctaagatggcttttt

SEQ ID NO: 2530 - DNA, 20 bp, Homo Sapiens
atccctaagatggctttttc

SEQ ID NO: 2531 - DNA, 20 bp, Homo Sapiens
tccctaagatggctttttct

SEQ ID NO: 2532 - DNA, 20 bp, Homo Sapiens
ccctaagatggctttttctc

SEQ ID NO: 2533 - DNA, 20 bp, Homo Sapiens
cctaagatggctttttctcc

SEQ ID NO: 2534 - DNA, 20 bp, Homo Sapiens
ctaagatggctttttctcct

SEQ ID NO: 2535 - DNA, 20 bp, Homo Sapiens
taagatggctttttctcctt

SEQ ID NO: 2536 - DNA, 20 bp, Homo Sapiens
aagatggctttttctccttg

SEQ ID NO: 2537 - DNA, 20 bp, Homo Sapiens
agatggctttttctccttgg

SEQ ID NO: 2538 - DNA, 20 bp, Homo Sapiens
gatggctttttctccttggt

SEQ ID NO: 2539 - DNA, 20 bp, Homo Sapiens
atggctttttctccttggta

SEQ ID NO: 2540 - DNA, 20 bp, Homo Sapiens
tggctttttctccttggtat

SEQ ID NO: 2541 - DNA, 20 bp, Homo Sapiens
ggctttttctccttggtatt

SEQ ID NO: 2542 - DNA, 20 bp, Homo Sapiens
gctttttctccttggtattt

SEQ ID NO: 2543 - DNA, 20 bp, Homo Sapiens
ctttttctccttggtatttc

SEQ ID NO: 2544 - DNA, 20 bp, Homo Sapiens
tttttctccttggtatttct

SEQ ID NO: 2545 - DNA, 20 bp, Homo Sapiens
ttttctccttggtatttctg

SEQ ID NO: 2546 - DNA, 20 bp, Homo Sapiens
tttctccttggtatttctgg

SEQ ID NO: 2547 - DNA, 20 bp, Homo Sapiens
ttctccttggtatttctggg

SEQ ID NO: 2548 - DNA, 20 bp, Homo Sapiens
tctccttggtatttctgggt

SEQ ID NO: 2549 - DNA, 20 bp, Homo Sapiens
ctccttggtatttctgggtc

SEQ ID NO: 2550 - DNA, 20 bp, Homo Sapiens
tccttggtatttctgggtct

SEQ ID NO: 2551 - DNA, 20 bp, Homo Sapiens
ccttggtatttctgggtctt

SEQ ID NO: 2552 - DNA, 20 bp, Homo Sapiens
cttggtatttctgggtcttt

SEQ ID NO: 2553 - DNA, 20 bp, Homo Sapiens
ttggtatttctgggtctttc

SEQ ID NO: 2554 - DNA, 20 bp, Homo Sapiens
tggtatttctgggtctttct

SEQ ID NO: 2555 - DNA, 20 bp, Homo Sapiens
ggtatttctgggtctttctg

SEQ ID NO: 2556 - DNA, 20 bp, Homo Sapiens
gtatttctgggtctttctga

SEQ ID NO: 2557 - DNA, 20 bp, Homo Sapiens
tatttctgggtctttctgac

SEQ ID NO: 2558 - DNA, 20 bp, Homo Sapiens
atttctgggtctttctgaca

SEQ ID NO: 2559 - DNA, 20 bp, Homo Sapiens
tttctgggtctttctgacat

SEQ ID NO: 2560 - DNA, 20 bp, Homo Sapiens
ttctgggtctttctgacatc

SEQ ID NO: 2561 - DNA, 20 bp, Homo Sapiens
tctgggtctttctgacatca

SEQ ID NO: 2562 - DNA, 20 bp, Homo Sapiens
ctgggtctttctgacatcag

SEQ ID NO: 2563 - DNA, 20 bp, Homo Sapiens
tgggtctttctgacatcagc

SEQ ID NO: 2564 - DNA, 20 bp, Homo Sapiens
gggtctttctgacatcagca

SEQ ID NO: 2565 - DNA, 20 bp, Homo Sapiens
ggtctttctgacatcagcag

SEQ ID NO: 2566 - DNA, 20 bp, Homo Sapiens
gtctttctgacatcagcaga

SEQ ID NO: 2567 - DNA, 20 bp, Homo Sapiens
tctttctgacatcagcagag

SEQ ID NO: 2568 - DNA, 20 bp, Homo Sapiens
ctttctgacatcagcagaga

SEQ ID NO: 2569 - DNA, 20 bp, Homo Sapiens
tttctgacatcagcagagaa

SEQ ID NO: 2570 - DNA, 20 bp, Homo Sapiens
ttctgacatcagcagagaac

SEQ ID NO: 2571 - DNA, 20 bp, Homo Sapiens
tctgacatcagcagagaact

SEQ ID NO: 2572 - DNA, 20 bp, Homo Sapiens
ctgacatcagcagagaactg

SEQ ID NO: 2573 - DNA, 20 bp, Homo Sapiens
tgacatcagcagagaactgg

SEQ ID NO: 2574 - DNA, 20 bp, Homo Sapiens
gacatcagcagagaactgga

SEQ ID NO: 2575 - DNA, 20 bp, Homo Sapiens
acatcagcagagaactggaa

SEQ ID NO: 2576 - DNA, 20 bp, Homo Sapiens
catcagcagagaactggaaa

SEQ ID NO: 2577 - DNA, 20 bp, Homo Sapiens
atcagcagagaactggaaag

SEQ ID NO: 2578 - DNA, 20 bp, Homo Sapiens
tcagcagagaactggaaaga

SEQ ID NO: 2579 - DNA, 20 bp, Homo Sapiens
cagcagagaactggaaagac

SEQ ID NO: 2580 - DNA, 20 bp, Homo Sapiens
agcagagaactggaaagaca

SEQ ID NO: 2581 - DNA, 20 bp, Homo Sapiens
gcagagaactggaaagacat

SEQ ID NO: 2582 - DNA, 20 bp, Homo Sapiens
cagagaactggaaagacata

SEQ ID NO: 2583 - DNA, 20 bp, Homo Sapiens
agagaactggaaagacatag

SEQ ID NO: 2584 - DNA, 20 bp, Homo Sapiens
gagaactggaaagacatagc

SEQ ID NO: 2585 - DNA, 20 bp, Homo Sapiens
agaactggaaagacatagcc

SEQ ID NO: 2586 - DNA, 20 bp, Homo Sapiens
gaactggaaagacatagcca

SEQ ID NO: 2587 - DNA, 20 bp, Homo Sapiens
aactggaaagacatagccaa

SEQ ID NO: 2588 - DNA, 20 bp, Homo Sapiens
actggaaagacatagccaac

SEQ ID NO: 2589 - DNA, 20 bp, Homo Sapiens
ctggaaagacatagccaact

SEQ ID NO: 2590 - DNA, 20 bp, Homo Sapiens
tggaaagacatagccaactg

SEQ ID NO: 2591 - DNA, 20 bp, Homo Sapiens
ggaaagacatagccaactgc

SEQ ID NO: 2592 - DNA, 20 bp, Homo Sapiens
gaaagacatagccaactgct

SEQ ID NO: 2593 - DNA, 20 bp, Homo Sapiens
aaagacatagccaactgctg

SEQ ID NO: 2594 - DNA, 20 bp, Homo Sapiens
aagacatagccaactgctgt

SEQ ID NO: 2595 - DNA, 20 bp, Homo Sapiens
agacatagccaactgctgtt

SEQ ID NO: 2596 - DNA, 20 bp, Homo Sapiens
gacatagccaactgctgttc

SEQ ID NO: 2597 - DNA, 20 bp, Homo Sapiens
acatagccaactgctgttca

SEQ ID NO: 2598 - DNA, 20 bp, Homo Sapiens
catagccaactgctgttcat

SEQ ID NO: 2599 - DNA, 20 bp, Homo Sapiens
atagccaactgctgttcatg

SEQ ID NO: 2600 - DNA, 20 bp, Homo Sapiens
tagccaactgctgttcatgt

SEQ ID NO: 2601 - DNA, 20 bp, Homo Sapiens
agccaactgctgttcatgtt

SEQ ID NO: 2602 - DNA, 20 bp, Homo Sapiens
gccaactgctgttcatgtta

SEQ ID NO: 2603 - DNA, 20 bp, Homo Sapiens
ccaactgctgttcatgttac

SEQ ID NO: 2604 - DNA, 20 bp, Homo Sapiens
caactgctgttcatgttact

SEQ ID NO: 2605 - DNA, 20 bp, Homo Sapiens
aactgctgttcatgttactc

SEQ ID NO: 2606 - DNA, 20 bp, Homo Sapiens
actgctgttcatgttactca

SEQ ID NO: 2607 - DNA, 20 bp, Homo Sapiens
ctgctgttcatgttactcat

SEQ ID NO: 2608 - DNA, 20 bp, Homo Sapiens
tgctgttcatgttactcatg

SEQ ID NO: 2609 - DNA, 20 bp, Homo Sapiens
gctgttcatgttactcatga

SEQ ID NO: 2610 - DNA, 20 bp, Homo Sapiens
ctgttcatgttactcatgac

SEQ ID NO: 2611 - DNA, 20 bp, Homo Sapiens
tgttcatgttactcatgact

SEQ ID NO: 2612 - DNA, 20 bp, Homo Sapiens
gttcatgttactcatgactc

SEQ ID NO: 2613 - DNA, 20 bp, Homo Sapiens
ttcatgttactcatgactcc

SEQ ID NO: 2614 - DNA, 20 bp, Homo Sapiens
tcatgttactcatgactcct

SEQ ID NO: 2615 - DNA, 20 bp, Homo Sapiens
catgttactcatgactcctt

SEQ ID NO: 2616 - DNA, 20 bp, Homo Sapiens
atgttactcatgactccttt

SEQ ID NO: 2617 - DNA, 20 bp, Homo Sapiens
tgttactcatgactcctttc

SEQ ID NO: 2618 - DNA, 20 bp, Homo Sapiens
gttactcatgactcctttct

SEQ ID NO: 2619 - DNA, 20 bp, Homo Sapiens
ttactcatgactcctttctc

SEQ ID NO: 2620 - DNA, 20 bp, Homo Sapiens
tactcatgactcctttctct

SEQ ID NO: 2621 - DNA, 20 bp, Homo Sapiens
actcatgactcctttctcta

SEQ ID NO: 2622 - DNA, 20 bp, Homo Sapiens
ctcatgactcctttctctaa

SEQ ID NO: 2623 - DNA, 20 bp, Homo Sapiens
tcatgactcctttctctaaa

SEQ ID NO: 2624 - DNA, 20 bp, Homo Sapiens
catgactcctttctctaaaa

SEQ ID NO: 2625 - DNA, 20 bp, Homo Sapiens
atgactcctttctctaaaac

SEQ ID NO: 2626 - DNA, 20 bp, Homo Sapiens
tgactcctttctctaaaact

SEQ ID NO: 2627 - DNA, 20 bp, Homo Sapiens
gactcctttctctaaaactg

SEQ ID NO: 2628 - DNA, 20 bp, Homo Sapiens
actcctttctctaaaactgc

SEQ ID NO: 2629 - DNA, 20 bp, Homo Sapiens
ctcctttctctaaaactgcc

SEQ ID NO: 2630 - DNA, 20 bp, Homo Sapiens
tcctttctctaaaactgcct

SEQ ID NO: 2631 - DNA, 20 bp, Homo Sapiens
cctttctctaaaactgcctt

SEQ ID NO: 2632 - DNA, 20 bp, Homo Sapiens
ctttctctaaaactgccttc

SEQ ID NO: 2633 - DNA, 20 bp, Homo Sapiens
tttctctaaaactgccttcc

SEQ ID NO: 2634 - DNA, 20 bp, Homo Sapiens
ttctctaaaactgccttcca

SEQ ID NO: 2635 - DNA, 20 bp, Homo Sapiens
tctctaaaactgccttccac

SEQ ID NO: 2636 - DNA, 20 bp, Homo Sapiens
ctctaaaactgccttccaca

SEQ ID NO: 2637 - DNA, 20 bp, Homo Sapiens
tctaaaactgccttccacaa

SEQ ID NO: 2638 - DNA, 20 bp, Homo Sapiens
ctaaaactgccttccacaat

SEQ ID NO: 2639 - DNA, 20 bp, Homo Sapiens
taaaactgccttccacaatt

SEQ ID NO: 2640 - DNA, 20 bp, Homo Sapiens
aaaactgccttccacaattc

SEQ ID NO: 2641 - DNA, 20 bp, Homo Sapiens
aaactgccttccacaattca

SEQ ID NO: 2642 - DNA, 20 bp, Homo Sapiens
aactgccttccacaattcac

SEQ ID NO: 2643 - DNA, 20 bp, Homo Sapiens
actgccttccacaattcact

SEQ ID NO: 2644 - DNA, 20 bp, Homo Sapiens
ctgccttccacaattcacta

SEQ ID NO: 2645 - DNA, 20 bp, Homo Sapiens
tgccttccacaattcactag

SEQ ID NO: 2646 - DNA, 20 bp, Homo Sapiens
gccttccacaattcactaga

SEQ ID NO: 2647 - DNA, 20 bp, Homo Sapiens
ccttccacaattcactagac

SEQ ID NO: 2648 - DNA, 20 bp, Homo Sapiens
cttccacaattcactagacc

SEQ ID NO: 2649 - DNA, 20 bp, Homo Sapiens
ttccacaattcactagacca

SEQ ID NO: 2650 - DNA, 20 bp, Homo Sapiens
tccacaattcactagaccag

SEQ ID NO: 2651 - DNA, 20 bp, Homo Sapiens
ccacaattcactagaccaga

SEQ ID NO: 2652 - DNA, 20 bp, Homo Sapiens
cacaattcactagaccagaa

SEQ ID NO: 2653 - DNA, 20 bp, Homo Sapiens
acaattcactagaccagaag

SEQ ID NO: 2654 - DNA, 20 bp, Homo Sapiens
caattcactagaccagaagt

SEQ ID NO: 2655 - DNA, 20 bp, Homo Sapiens
aattcactagaccagaagtg

SEQ ID NO: 2656 - DNA, 20 bp, Homo Sapiens
attcactagaccagaagtgg

SEQ ID NO: 2657 - DNA, 20 bp, Homo Sapiens
ttcactagaccagaagtgga

SEQ ID NO: 2658 - DNA, 20 bp, Homo Sapiens
tcactagaccagaagtggac

SEQ ID NO: 2659 - DNA, 20 bp, Homo Sapiens
cactagaccagaagtggacg

SEQ ID NO: 2660 - DNA, 20 bp, Homo Sapiens
actagaccagaagtggacgc

SEQ ID NO: 2661 - DNA, 20 bp, Homo Sapiens
ctagaccagaagtggacgca

SEQ ID NO: 2662 - DNA, 20 bp, Homo Sapiens
tagaccagaagtggacgcaa

SEQ ID NO: 2663 - DNA, 20 bp, Homo Sapiens
agaccagaagtggacgcaac

SEQ ID NO: 2664 - DNA, 20 bp, Homo Sapiens
gaccagaagtggacgcaact

SEQ ID NO: 2665 - DNA, 20 bp, Homo Sapiens
accagaagtggacgcaactt

SEQ ID NO: 2666 - DNA, 20 bp, Homo Sapiens
ccagaagtggacgcaactta

SEQ ID NO: 2667 - DNA, 20 bp, Homo Sapiens
cagaagtggacgcaacttaa

SEQ ID NO: 2668 - DNA, 20 bp, Homo Sapiens
agaagtggacgcaacttaag

SEQ ID NO: 2669 - DNA, 20 bp, Homo Sapiens
gaagtggacgcaacttaagc

SEQ ID NO: 2670 - DNA, 20 bp, Homo Sapiens
aagtggacgcaacttaagct

SEQ ID NO: 2671 - DNA, 20 bp, Homo Sapiens
agtggacgcaacttaagctg

SEQ ID NO: 2672 - DNA, 20 bp, Homo Sapiens
gtggacgcaacttaagctgg

SEQ ID NO: 2673 - DNA, 20 bp, Homo Sapiens
tggacgcaacttaagctggg

SEQ ID NO: 2674 - DNA, 20 bp, Homo Sapiens
ggacgcaacttaagctggga

SEQ ID NO: 2675 - DNA, 20 bp, Homo Sapiens
gacgcaacttaagctgggat

SEQ ID NO: 2676 - DNA, 20 bp, Homo Sapiens
acgcaacttaagctgggata

SEQ ID NO: 2677 - DNA, 20 bp, Homo Sapiens
cgcaacttaagctgggataa

SEQ ID NO: 2678 - DNA, 20 bp, Homo Sapiens
gcaacttaagctgggataat

SEQ ID NO: 2679 - DNA, 20 bp, Homo Sapiens
caacttaagctgggataatc

SEQ ID NO: 2680 - DNA, 20 bp, Homo Sapiens
aacttaagctgggataatca

SEQ ID NO: 2681 - DNA, 20 bp, Homo Sapiens
acttaagctgggataatcac

SEQ ID NO: 2682 - DNA, 20 bp, Homo Sapiens
cttaagctgggataatcaca

SEQ ID NO: 2683 - DNA, 20 bp, Homo Sapiens
ttaagctgggataatcacat

SEQ ID NO: 2684 - DNA, 20 bp, Homo Sapiens
taagctgggataatcacatt

SEQ ID NO: 2685 - DNA, 20 bp, Homo Sapiens
aagctgggataatcacatta

SEQ ID NO: 2686 - DNA, 20 bp, Homo Sapiens
agctgggataatcacattat

SEQ ID NO: 2687 - DNA, 20 bp, Homo Sapiens
gctgggataatcacattatc

SEQ ID NO: 2688 - DNA, 20 bp, Homo Sapiens
ctgggataatcacattatca

SEQ ID NO: 2689 - DNA, 20 bp, Homo Sapiens
tgggataatcacattatcat

SEQ ID NO: 2690 - DNA, 20 bp, Homo Sapiens
gggataatcacattatcatc

SEQ ID NO: 2691 - DNA, 20 bp, Homo Sapiens
ggataatcacattatcatct

SEQ ID NO: 2692 - DNA, 20 bp, Homo Sapiens
gataatcacattatcatctg

SEQ ID NO: 2693 - DNA, 20 bp, Homo Sapiens
ataatcacattatcatctga

SEQ ID NO: 2694 - DNA, 20 bp, Homo Sapiens
taatcacattatcatctgaa

SEQ ID NO: 2695 - DNA, 20 bp, Homo Sapiens
aatcacattatcatctgaaa

SEQ ID NO: 2696 - DNA, 20 bp, Homo Sapiens
atcacattatcatctgaaaa

SEQ ID NO: 2697 - DNA, 20 bp, Homo Sapiens
tcacattatcatctgaaaat

SEQ ID NO: 2698 - DNA, 20 bp, Homo Sapiens
cacattatcatctgaaaatc

SEQ ID NO: 2699 - DNA, 20 bp, Homo Sapiens
acattatcatctgaaaatct

SEQ ID NO: 2700 - DNA, 20 bp, Homo Sapiens
cattatcatctgaaaatctg

SEQ ID NO: 2701 - DNA, 20 bp, Homo Sapiens
attatcatctgaaaatctgg

SEQ ID NO: 2702 - DNA, 20 bp, Homo Sapiens
ttatcatctgaaaatctgga

SEQ ID NO: 2703 - DNA, 20 bp, Homo Sapiens
tatcatctgaaaatctggag

SEQ ID NO: 2704 - DNA, 20 bp, Homo Sapiens
atcatctgaaaatctggagt

SEQ ID NO: 2705 - DNA, 20 bp, Homo Sapiens
tcatctgaaaatctggagtt

SEQ ID NO: 2706 - DNA, 20 bp, Homo Sapiens
catctgaaaatctggagttg

SEQ ID NO: 2707 - DNA, 20 bp, Homo Sapiens
atctgaaaatctggagttga

SEQ ID NO: 2708 - DNA, 20 bp, Homo Sapiens
tctgaaaatctggagttgaa

SEQ ID NO: 2709 - DNA, 20 bp, Homo Sapiens
ctgaaaatctggagttgaac

SEQ ID NO: 2710 - DNA, 20 bp, Homo Sapiens
tgaaaatctggagttgaaca

SEQ ID NO: 2711 - DNA, 20 bp, Homo Sapiens
gaaaatctggagttgaacag

SEQ ID NO: 2712 - DNA, 20 bp, Homo Sapiens
aaaatctggagttgaacagc

SEQ ID NO: 2713 - DNA, 20 bp, Homo Sapiens
aaatctggagttgaacagca

SEQ ID NO: 2714 - DNA, 20 bp, Homo Sapiens
aatctggagttgaacagcaa

SEQ ID NO: 2715 - DNA, 20 bp, Homo Sapiens
atctggagttgaacagcaaa

SEQ ID NO: 2716 - DNA, 20 bp, Homo Sapiens
tctggagttgaacagcaaaa

SEQ ID NO: 2717 - DNA, 20 bp, Homo Sapiens
ctggagttgaacagcaaaag

SEQ ID NO: 2718 - DNA, 20 bp, Homo Sapiens
tggagttgaacagcaaaaga

SEQ ID NO: 2719 - DNA, 20 bp, Homo Sapiens
ggagttgaacagcaaaagaa

SEQ ID NO: 2720 - DNA, 20 bp, Homo Sapiens
gagttgaacagcaaaagaag

SEQ ID NO: 2721 - DNA, 20 bp, Homo Sapiens
agttgaacagcaaaagaaga

SEQ ID NO: 2722 - DNA, 20 bp, Homo Sapiens
gttgaacagcaaaagaagac

SEQ ID NO: 2723 - DNA, 20 bp, Homo Sapiens
ttgaacagcaaaagaagaca

SEQ ID NO: 2724 - DNA, 20 bp, Homo Sapiens
tgaacagcaaaagaagacaa

SEQ ID NO: 2725 - DNA, 20 bp, Homo Sapiens
gaacagcaaaagaagacaac

SEQ ID NO: 2726 - DNA, 20 bp, Homo Sapiens
aacagcaaaagaagacaaca

SEQ ID NO: 2727 - DNA, 20 bp, Homo Sapiens
acagcaaaagaagacaacat

SEQ ID NO: 2728 - DNA, 20 bp, Homo Sapiens
cagcaaaagaagacaacatt

SEQ ID NO: 2729 - DNA, 20 bp, Homo Sapiens
agcaaaagaagacaacattt

SEQ ID NO: 2730 - DNA, 20 bp, Homo Sapiens
gcaaaagaagacaacatttc

SEQ ID NO: 2731 - DNA, 20 bp, Homo Sapiens
caaaagaagacaacatttct

SEQ ID NO: 2732 - DNA, 20 bp, Homo Sapiens
aaaagaagacaacatttctc

SEQ ID NO: 2733 - DNA, 20 bp, Homo Sapiens
aaagaagacaacatttctca

SEQ ID NO: 2734 - DNA, 20 bp, Homo Sapiens
aagaagacaacatttctcaa

SEQ ID NO: 2735 - DNA, 20 bp, Homo Sapiens
agaagacaacatttctcaaa

SEQ ID NO: 2736 - DNA, 20 bp, Homo Sapiens
gaagacaacatttctcaaat

SEQ ID NO: 2737 - DNA, 20 bp, Homo Sapiens
aagacaacatttctcaaatg

SEQ ID NO: 2738 - DNA, 20 bp, Homo Sapiens
agacaacatttctcaaatgc

SEQ ID NO: 2739 - DNA, 20 bp, Homo Sapiens
gacaacatttctcaaatgca

SEQ ID NO: 2740 - DNA, 20 bp, Homo Sapiens
acaacatttctcaaatgcac

SEQ ID NO: 2741 - DNA, 20 bp, Homo Sapiens
caacatttctcaaatgcaca

SEQ ID NO: 2742 - DNA, 20 bp, Homo Sapiens
aacatttctcaaatgcacat

SEQ ID NO: 2743 - DNA, 20 bp, Homo Sapiens
acatttctcaaatgcacatc

SEQ ID NO: 2744 - DNA, 20 bp, Homo Sapiens
catttctcaaatgcacatct

SEQ ID NO: 2745 - DNA, 20 bp, Homo Sapiens
atttctcaaatgcacatctc

SEQ ID NO: 2746 - DNA, 20 bp, Homo Sapiens
tttctcaaatgcacatctca

SEQ ID NO: 2747 - DNA, 20 bp, Homo Sapiens
ttctcaaatgcacatctcat

SEQ ID NO: 2748 - DNA, 20 bp, Homo Sapiens
tctcaaatgcacatctcatg

SEQ ID NO: 2749 - DNA, 20 bp, Homo Sapiens
ctcaaatgcacatctcatgg

SEQ ID NO: 2750 - DNA, 20 bp, Homo Sapiens
tcaaatgcacatctcatggc

SEQ ID NO: 2751 - DNA, 20 bp, Homo Sapiens
caaatgcacatctcatggca

SEQ ID NO: 2752 - DNA, 20 bp, Homo Sapiens
aaatgcacatctcatggcag

SEQ ID NO: 2753 - DNA, 20 bp, Homo Sapiens
aatgcacatctcatggcagc

SEQ ID NO: 2754 - DNA, 20 bp, Homo Sapiens
atgcacatctcatggcagct

SEQ ID NO: 2755 - DNA, 20 bp, Homo Sapiens
tgcacatctcatggcagcta

SEQ ID NO: 2756 - DNA, 20 bp, Homo Sapiens
gcacatctcatggcagctaa

SEQ ID NO: 2757 - DNA, 20 bp, Homo Sapiens
cacatctcatggcagctaag

SEQ ID NO: 2758 - DNA, 20 bp, Homo Sapiens
acatctcatggcagctaagc

SEQ ID NO: 2759 - DNA, 20 bp, Homo Sapiens
catctcatggcagctaagcc

SEQ ID NO: 2760 - DNA, 20 bp, Homo Sapiens
atctcatggcagctaagcca

SEQ ID NO: 2761 - DNA, 20 bp, Homo Sapiens
tctcatggcagctaagccac

SEQ ID NO: 2762 - DNA, 20 bp, Homo Sapiens
ctcatggcagctaagccaca

SEQ ID NO: 2763 - DNA, 20 bp, Homo Sapiens
tcatggcagctaagccacat

SEQ ID NO: 2764 - DNA, 20 bp, Homo Sapiens
catggcagctaagccacatg

SEQ ID NO: 2765 - DNA, 20 bp, Homo Sapiens
atggcagctaagccacatgg

SEQ ID NO: 2766 - DNA, 20 bp, Homo Sapiens
tggcagctaagccacatggc

SEQ ID NO: 2767 - DNA, 20 bp, Homo Sapiens
ggcagctaagccacatggct

SEQ ID NO: 2768 - DNA, 20 bp, Homo Sapiens
gcagctaagccacatggctg

SEQ ID NO: 2769 - DNA, 20 bp, Homo Sapiens
cagctaagccacatggctgg

SEQ ID NO: 2770 - DNA, 20 bp, Homo Sapiens
agctaagccacatggctggg

SEQ ID NO: 2771 - DNA, 20 bp, Homo Sapiens
gctaagccacatggctggga

SEQ ID NO: 2772 - DNA, 20 bp, Homo Sapiens
ctaagccacatggctgggat

SEQ ID NO: 2773 - DNA, 20 bp, Homo Sapiens
taagccacatggctgggatt

SEQ ID NO: 2774 - DNA, 20 bp, Homo Sapiens
aagccacatggctgggattt

SEQ ID NO: 2775 - DNA, 20 bp, Homo Sapiens
agccacatggctgggattta

SEQ ID NO: 2776 - DNA, 20 bp, Homo Sapiens
gccacatggctgggatttaa

SEQ ID NO: 2777 - DNA, 20 bp, Homo Sapiens
ccacatggctgggatttaaa

SEQ ID NO: 2778 - DNA, 20 bp, Homo Sapiens
cacatggctgggatttaaag

SEQ ID NO: 2779 - DNA, 20 bp, Homo Sapiens
acatggctgggatttaaagc

SEQ ID NO: 2780 - DNA, 20 bp, Homo Sapiens
catggctgggatttaaagcc

SEQ ID NO: 2781 - DNA, 20 bp, Homo Sapiens
atggctgggatttaaagcct

SEQ ID NO: 2782 - DNA, 20 bp, Homo Sapiens
tggctgggatttaaagcctt

SEQ ID NO: 2783 - DNA, 20 bp, Homo Sapiens
ggctgggatttaaagccttt

SEQ ID NO: 2784 - DNA, 20 bp, Homo Sapiens
gctgggatttaaagccttta

SEQ ID NO: 2785 - DNA, 20 bp, Homo Sapiens
ctgggatttaaagcctttag

SEQ ID NO: 2786 - DNA, 20 bp, Homo Sapiens
tgggatttaaagcctttaga

SEQ ID NO: 2787 - DNA, 20 bp, Homo Sapiens
gggatttaaagcctttagag

SEQ ID NO: 2788 - DNA, 20 bp, Homo Sapiens
ggatttaaagcctttagagc

SEQ ID NO: 2789 - DNA, 20 bp, Homo Sapiens
gatttaaagcctttagagcc

SEQ ID NO: 2790 - DNA, 20 bp, Homo Sapiens
atttaaagcctttagagcca

SEQ ID NO: 2791 - DNA, 20 bp, Homo Sapiens
tttaaagcctttagagccag

SEQ ID NO: 2792 - DNA, 20 bp, Homo Sapiens
ttaaagcctttagagccagc

SEQ ID NO: 2793 - DNA, 20 bp, Homo Sapiens
taaagcctttagagccagcc

SEQ ID NO: 2794 - DNA, 20 bp, Homo Sapiens
aaagcctttagagccagccc

SEQ ID NO: 2795 - DNA, 20 bp, Homo Sapiens
aagcctttagagccagccca

SEQ ID NO: 2796 - DNA, 20 bp, Homo Sapiens
agcctttagagccagcccat

SEQ ID NO: 2797 - DNA, 20 bp, Homo Sapiens
gcctttagagccagcccatg

SEQ ID NO: 2798 - DNA, 20 bp, Homo Sapiens
cctttagagccagcccatgg

SEQ ID NO: 2799 - DNA, 20 bp, Homo Sapiens
ctttagagccagcccatggc

SEQ ID NO: 2800 - DNA, 20 bp, Homo Sapiens
tttagagccagcccatggct

SEQ ID NO: 2801 - DNA, 20 bp, Homo Sapiens
ttagagccagcccatggctt

SEQ ID NO: 2802 - DNA, 20 bp, Homo Sapiens
tagagccagcccatggcttt

SEQ ID NO: 2803 - DNA, 20 bp, Homo Sapiens
agagccagcccatggcttta

SEQ ID NO: 2804 - DNA, 20 bp, Homo Sapiens
gagccagcccatggctttag

SEQ ID NO: 2805 - DNA, 20 bp, Homo Sapiens
agccagcccatggctttagc

SEQ ID NO: 2806 - DNA, 20 bp, Homo Sapiens
gccagcccatggctttagct

SEQ ID NO: 2807 - DNA, 20 bp, Homo Sapiens
ccagcccatggctttagcta

SEQ ID NO: 2808 - DNA, 20 bp, Homo Sapiens
cagcccatggctttagctac

SEQ ID NO: 2809 - DNA, 20 bp, Homo Sapiens
agcccatggctttagctacc

SEQ ID NO: 2810 - DNA, 20 bp, Homo Sapiens
gcccatggctttagctacct

SEQ ID NO: 2811 - DNA, 20 bp, Homo Sapiens
cccatggctttagctacctc

SEQ ID NO: 2812 - DNA, 20 bp, Homo Sapiens
ccatggctttagctacctca

SEQ ID NO: 2813 - DNA, 20 bp, Homo Sapiens
catggctttagctacctcac

SEQ ID NO: 2814 - DNA, 20 bp, Homo Sapiens
atggctttagctacctcact

SEQ ID NO: 2815 - DNA, 20 bp, Homo Sapiens
tggctttagctacctcacta

SEQ ID NO: 2816 - DNA, 20 bp, Homo Sapiens
ggctttagctacctcactat

SEQ ID NO: 2817 - DNA, 20 bp, Homo Sapiens
gctttagctacctcactatg

SEQ ID NO: 2818 - DNA, 20 bp, Homo Sapiens
ctttagctacctcactatgc

SEQ ID NO: 2819 - DNA, 20 bp, Homo Sapiens
tttagctacctcactatgct

SEQ ID NO: 2820 - DNA, 20 bp, Homo Sapiens
ttagctacctcactatgctg

SEQ ID NO: 2821 - DNA, 20 bp, Homo Sapiens
tagctacctcactatgctgc

SEQ ID NO: 2822 - DNA, 20 bp, Homo Sapiens
agctacctcactatgctgct

SEQ ID NO: 2823 - DNA, 20 bp, Homo Sapiens
gctacctcactatgctgctt

SEQ ID NO: 2824 - DNA, 20 bp, Homo Sapiens
ctacctcactatgctgcttc

SEQ ID NO: 2825 - DNA, 20 bp, Homo Sapiens
tacctcactatgctgcttca

SEQ ID NO: 2826 - DNA, 20 bp, Homo Sapiens
acctcactatgctgcttcac

SEQ ID NO: 2827 - DNA, 20 bp, Homo Sapiens
cctcactatgctgcttcaca

SEQ ID NO: 2828 - DNA, 20 bp, Homo Sapiens
ctcactatgctgcttcacaa

SEQ ID NO: 2829 - DNA, 20 bp, Homo Sapiens
tcactatgctgcttcacaaa

SEQ ID NO: 2830 - DNA, 20 bp, Homo Sapiens
cactatgctgcttcacaaac

SEQ ID NO: 2831 - DNA, 20 bp, Homo Sapiens
actatgctgcttcacaaacc

SEQ ID NO: 2832 - DNA, 20 bp, Homo Sapiens
ctatgctgcttcacaaacct

SEQ ID NO: 2833 - DNA, 20 bp, Homo Sapiens
tatgctgcttcacaaacctt

SEQ ID NO: 2834 - DNA, 20 bp, Homo Sapiens
atgctgcttcacaaaccttg

SEQ ID NO: 2835 - DNA, 20 bp, Homo Sapiens
tgctgcttcacaaaccttgc

SEQ ID NO: 2836 - DNA, 20 bp, Homo Sapiens
gctgcttcacaaaccttgct

SEQ ID NO: 2837 - DNA, 20 bp, Homo Sapiens
ctgcttcacaaaccttgctc

SEQ ID NO: 2838 - DNA, 20 bp, Homo Sapiens
tgcttcacaaaccttgctcc

SEQ ID NO: 2839 - DNA, 20 bp, Homo Sapiens
gcttcacaaaccttgctcct

SEQ ID NO: 2840 - DNA, 20 bp, Homo Sapiens
cttcacaaaccttgctcctg

SEQ ID NO: 2841 - DNA, 20 bp, Homo Sapiens
ttcacaaaccttgctcctgt

SEQ ID NO: 2842 - DNA, 20 bp, Homo Sapiens
tcacaaaccttgctcctgtg

SEQ ID NO: 2843 - DNA, 20 bp, Homo Sapiens
cacaaaccttgctcctgtgt

SEQ ID NO: 2844 - DNA, 20 bp, Homo Sapiens
acaaaccttgctcctgtgta

SEQ ID NO: 2845 - DNA, 20 bp, Homo Sapiens
caaaccttgctcctgtgtaa

SEQ ID NO: 2846 - DNA, 20 bp, Homo Sapiens
aaaccttgctcctgtgtaaa

SEQ ID NO: 2847 - DNA, 20 bp, Homo Sapiens
aaccttgctcctgtgtaaaa

SEQ ID NO: 2848 - DNA, 20 bp, Homo Sapiens
accttgctcctgtgtaaaac

SEQ ID NO: 2849 - DNA, 20 bp, Homo Sapiens
ccttgctcctgtgtaaaact

SEQ ID NO: 2850 - DNA, 20 bp, Homo Sapiens
cttgctcctgtgtaaaacta

SEQ ID NO: 2851 - DNA, 20 bp, Homo Sapiens
ttgctcctgtgtaaaactat

SEQ ID NO: 2852 - DNA, 20 bp, Homo Sapiens
tgctcctgtgtaaaactata

SEQ ID NO: 2853 - DNA, 20 bp, Homo Sapiens
gctcctgtgtaaaactatat

SEQ ID NO: 2854 - DNA, 20 bp, Homo Sapiens
ctcctgtgtaaaactatatt

SEQ ID NO: 2855 - DNA, 20 bp, Homo Sapiens
tcctgtgtaaaactatattc

SEQ ID NO: 2856 - DNA, 20 bp, Homo Sapiens
cctgtgtaaaactatattct

SEQ ID NO: 2857 - DNA, 20 bp, Homo Sapiens
ctgtgtaaaactatattctc

SEQ ID NO: 2858 - DNA, 20 bp, Homo Sapiens
tgtgtaaaactatattctca

SEQ ID NO: 2859 - DNA, 20 bp, Homo Sapiens
gtgtaaaactatattctcag

SEQ ID NO: 2860 - DNA, 20 bp, Homo Sapiens
tgtaaaactatattctcagt

SEQ ID NO: 2861 - DNA, 20 bp, Homo Sapiens
gtaaaactatattctcagtg

SEQ ID NO: 2862 - DNA, 20 bp, Homo Sapiens
taaaactatattctcagtgt

SEQ ID NO: 2863 - DNA, 20 bp, Homo Sapiens
aaaactatattctcagtgta

SEQ ID NO: 2864 - DNA, 20 bp, Homo Sapiens
aaactatattctcagtgtag

SEQ ID NO: 2865 - DNA, 20 bp, Homo Sapiens
aactatattctcagtgtagg

SEQ ID NO: 2866 - DNA, 20 bp, Homo Sapiens
actatattctcagtgtaggg

SEQ ID NO: 2867 - DNA, 20 bp, Homo Sapiens
ctatattctcagtgtagggc

SEQ ID NO: 2868 - DNA, 20 bp, Homo Sapiens
tatattctcagtgtagggca

SEQ ID NO: 2869 - DNA, 20 bp, Homo Sapiens
atattctcagtgtagggcag

SEQ ID NO: 2870 - DNA, 20 bp, Homo Sapiens
tattctcagtgtagggcaga

SEQ ID NO: 2871 - DNA, 20 bp, Homo Sapiens
attctcagtgtagggcagag

SEQ ID NO: 2872 - DNA, 20 bp, Homo Sapiens
ttctcagtgtagggcagaga

SEQ ID NO: 2873 - DNA, 20 bp, Homo Sapiens
tctcagtgtagggcagagag

SEQ ID NO: 2874 - DNA, 20 bp, Homo Sapiens
ctcagtgtagggcagagagg

SEQ ID NO: 2875 - DNA, 20 bp, Homo Sapiens
tcagtgtagggcagagaggt

SEQ ID NO: 2876 - DNA, 20 bp, Homo Sapiens
cagtgtagggcagagaggtc

SEQ ID NO: 2877 - DNA, 20 bp, Homo Sapiens
agtgtagggcagagaggtct

SEQ ID NO: 2878 - DNA, 20 bp, Homo Sapiens
gtgtagggcagagaggtcta

SEQ ID NO: 2879 - DNA, 20 bp, Homo Sapiens
tgtagggcagagaggtctaa

SEQ ID NO: 2880 - DNA, 20 bp, Homo Sapiens
gtagggcagagaggtctaac

SEQ ID NO: 2881 - DNA, 20 bp, Homo Sapiens
tagggcagagaggtctaaca

SEQ ID NO: 2882 - DNA, 20 bp, Homo Sapiens
agggcagagaggtctaacac

SEQ ID NO: 2883 - DNA, 20 bp, Homo Sapiens
gggcagagaggtctaacacc

SEQ ID NO: 2884 - DNA, 20 bp, Homo Sapiens
ggcagagaggtctaacacca

SEQ ID NO: 2885 - DNA, 20 bp, Homo Sapiens
gcagagaggtctaacaccaa

SEQ ID NO: 2886 - DNA, 20 bp, Homo Sapiens
cagagaggtctaacaccaac

SEQ ID NO: 2887 - DNA, 20 bp, Homo Sapiens
agagaggtctaacaccaaca

SEQ ID NO: 2888 - DNA, 20 bp, Homo Sapiens
gagaggtctaacaccaacat

SEQ ID NO: 2889 - DNA, 20 bp, Homo Sapiens
agaggtctaacaccaacata

SEQ ID NO: 2890 - DNA, 20 bp, Homo Sapiens
gaggtctaacaccaacataa

SEQ ID NO: 2891 - DNA, 20 bp, Homo Sapiens
aggtctaacaccaacataag

SEQ ID NO: 2892 - DNA, 20 bp, Homo Sapiens
ggtctaacaccaacataagg

SEQ ID NO: 2893 - DNA, 20 bp, Homo Sapiens
gtctaacaccaacataaggt

SEQ ID NO: 2894 - DNA, 20 bp, Homo Sapiens
tctaacaccaacataaggta

SEQ ID NO: 2895 - DNA, 20 bp, Homo Sapiens
ctaacaccaacataaggtac

SEQ ID NO: 2896 - DNA, 20 bp, Homo Sapiens
taacaccaacataaggtact

SEQ ID NO: 2897 - DNA, 20 bp, Homo Sapiens
aacaccaacataaggtacta

SEQ ID NO: 2898 - DNA, 20 bp, Homo Sapiens
acaccaacataaggtactag

SEQ ID NO: 2899 - DNA, 20 bp, Homo Sapiens
caccaacataaggtactagc

SEQ ID NO: 2900 - DNA, 20 bp, Homo Sapiens
accaacataaggtactagca

SEQ ID NO: 2901 - DNA, 20 bp, Homo Sapiens
ccaacataaggtactagcag

SEQ ID NO: 2902 - DNA, 20 bp, Homo Sapiens
caacataaggtactagcagt

SEQ ID NO: 2903 - DNA, 20 bp, Homo Sapiens
aacataaggtactagcagtg

SEQ ID NO: 2904 - DNA, 20 bp, Homo Sapiens
acataaggtactagcagtgt

SEQ ID NO: 2905 - DNA, 20 bp, Homo Sapiens
cataaggtactagcagtgtt

SEQ ID NO: 2906 - DNA, 20 bp, Homo Sapiens
ataaggtactagcagtgttt

SEQ ID NO: 2907 - DNA, 20 bp, Homo Sapiens
taaggtactagcagtgtttc

SEQ ID NO: 2908 - DNA, 20 bp, Homo Sapiens
aaggtactagcagtgtttcc

SEQ ID NO: 2909 - DNA, 20 bp, Homo Sapiens
aggtactagcagtgtttccc

SEQ ID NO: 2910 - DNA, 20 bp, Homo Sapiens
ggtactagcagtgtttcccg

SEQ ID NO: 2911 - DNA, 20 bp, Homo Sapiens
gtactagcagtgtttcccgt

SEQ ID NO: 2912 - DNA, 20 bp, Homo Sapiens
tactagcagtgtttcccgta

SEQ ID NO: 2913 - DNA, 20 bp, Homo Sapiens
actagcagtgtttcccgtat

SEQ ID NO: 2914 - DNA, 20 bp, Homo Sapiens
ctagcagtgtttcccgtatt

SEQ ID NO: 2915 - DNA, 20 bp, Homo Sapiens
tagcagtgtttcccgtattg

SEQ ID NO: 2916 - DNA, 20 bp, Homo Sapiens
agcagtgtttcccgtattga

SEQ ID NO: 2917 - DNA, 20 bp, Homo Sapiens
gcagtgtttcccgtattgac

SEQ ID NO: 2918 - DNA, 20 bp, Homo Sapiens
cagtgtttcccgtattgaca

SEQ ID NO: 2919 - DNA, 20 bp, Homo Sapiens
agtgtttcccgtattgacag

SEQ ID NO: 2920 - DNA, 20 bp, Homo Sapiens
gtgtttcccgtattgacagg

SEQ ID NO: 2921 - DNA, 20 bp, Homo Sapiens
tgtttcccgtattgacagga

SEQ ID NO: 2922 - DNA, 20 bp, Homo Sapiens
gtttcccgtattgacaggaa

SEQ ID NO: 2923 - DNA, 20 bp, Homo Sapiens
tttcccgtattgacaggaat

SEQ ID NO: 2924 - DNA, 20 bp, Homo Sapiens
ttcccgtattgacaggaata

SEQ ID NO: 2925 - DNA, 20 bp, Homo Sapiens
tcccgtattgacaggaatac

SEQ ID NO: 2926 - DNA, 20 bp, Homo Sapiens
cccgtattgacaggaatact

SEQ ID NO: 2927 - DNA, 20 bp, Homo Sapiens
ccgtattgacaggaatactt

SEQ ID NO: 2928 - DNA, 20 bp, Homo Sapiens
cgtattgacaggaatactta

SEQ ID NO: 2929 - DNA, 20 bp, Homo Sapiens
gtattgacaggaatacttaa

SEQ ID NO: 2930 - DNA, 20 bp, Homo Sapiens
tattgacaggaatacttaac

SEQ ID NO: 2931 - DNA, 20 bp, Homo Sapiens
attgacaggaatacttaact

SEQ ID NO: 2932 - DNA, 20 bp, Homo Sapiens
ttgacaggaatacttaactc

SEQ ID NO: 2933 - DNA, 20 bp, Homo Sapiens
tgacaggaatacttaactca

SEQ ID NO: 2934 - DNA, 20 bp, Homo Sapiens
gacaggaatacttaactcaa

SEQ ID NO: 2935 - DNA, 20 bp, Homo Sapiens
acaggaatacttaactcaat

SEQ ID NO: 2936 - DNA, 20 bp, Homo Sapiens
caggaatacttaactcaata

SEQ ID NO: 2937 - DNA, 20 bp, Homo Sapiens
aggaatacttaactcaataa

SEQ ID NO: 2938 - DNA, 20 bp, Homo Sapiens
ggaatacttaactcaataat

SEQ ID NO: 2939 - DNA, 20 bp, Homo Sapiens
gaatacttaactcaataatt

SEQ ID NO: 2940 - DNA, 20 bp, Homo Sapiens
aatacttaactcaataattc

SEQ ID NO: 2941 - DNA, 20 bp, Homo Sapiens
atacttaactcaataattct

SEQ ID NO: 2942 - DNA, 20 bp, Homo Sapiens
tacttaactcaataattctt

SEQ ID NO: 2943 - DNA, 20 bp, Homo Sapiens
acttaactcaataattcttt

SEQ ID NO: 2944 - DNA, 20 bp, Homo Sapiens
cttaactcaataattctttt

SEQ ID NO: 2945 - DNA, 20 bp, Homo Sapiens
ttaactcaataattcttttc

SEQ ID NO: 2946 - DNA, 20 bp, Homo Sapiens
taactcaataattcttttct

SEQ ID NO: 2947 - DNA, 20 bp, Homo Sapiens
aactcaataattcttttctt

SEQ ID NO: 2948 - DNA, 20 bp, Homo Sapiens
actcaataattcttttcttt

SEQ ID NO: 2949 - DNA, 20 bp, Homo Sapiens
ctcaataattcttttctttt

SEQ ID NO: 2950 - DNA, 20 bp, Homo Sapiens
tcaataattcttttcttttc

SEQ ID NO: 2951 - DNA, 20 bp, Homo Sapiens
caataattcttttcttttcc

SEQ ID NO: 2952 - DNA, 20 bp, Homo Sapiens
aataattcttttcttttcca

SEQ ID NO: 2953 - DNA, 20 bp, Homo Sapiens
ataattcttttcttttccat

SEQ ID NO: 2954 - DNA, 20 bp, Homo Sapiens
taattcttttcttttccatt

SEQ ID NO: 2955 - DNA, 20 bp, Homo Sapiens
aattcttttcttttccattt

SEQ ID NO: 2956 - DNA, 20 bp, Homo Sapiens
attcttttcttttccattta

SEQ ID NO: 2957 - DNA, 20 bp, Homo Sapiens
ttcttttcttttccatttag

SEQ ID NO: 2958 - DNA, 20 bp, Homo Sapiens
tcttttcttttccatttagt

SEQ ID NO: 2959 - DNA, 20 bp, Homo Sapiens
cttttcttttccatttagta

SEQ ID NO: 2960 - DNA, 20 bp, Homo Sapiens
ttttcttttccatttagtaa

SEQ ID NO: 2961 - DNA, 20 bp, Homo Sapiens
tttcttttccatttagtaac

SEQ ID NO: 2962 - DNA, 20 bp, Homo Sapiens
ttcttttccatttagtaaca

SEQ ID NO: 2963 - DNA, 20 bp, Homo Sapiens
tcttttccatttagtaacag

SEQ ID NO: 2964 - DNA, 20 bp, Homo Sapiens
cttttccatttagtaacagt

SEQ ID NO: 2965 - DNA, 20 bp, Homo Sapiens
ttttccatttagtaacagtt

SEQ ID NO: 2966 - DNA, 20 bp, Homo Sapiens
tttccatttagtaacagttg

SEQ ID NO: 2967 - DNA, 20 bp, Homo Sapiens
ttccatttagtaacagttgt

SEQ ID NO: 2968 - DNA, 20 bp, Homo Sapiens
tccatttagtaacagttgtg

SEQ ID NO: 2969 - DNA, 20 bp, Homo Sapiens
ccatttagtaacagttgtga

SEQ ID NO: 2970 - DNA, 20 bp, Homo Sapiens
catttagtaacagttgtgat

SEQ ID NO: 2971 - DNA, 20 bp, Homo Sapiens
atttagtaacagttgtgatg

SEQ ID NO: 2972 - DNA, 20 bp, Homo Sapiens
tttagtaacagttgtgatga

SEQ ID NO: 2973 - DNA, 20 bp, Homo Sapiens
ttagtaacagttgtgatgac

SEQ ID NO: 2974 - DNA, 20 bp, Homo Sapiens
tagtaacagttgtgatgact

SEQ ID NO: 2975 - DNA, 20 bp, Homo Sapiens
agtaacagttgtgatgacta

SEQ ID NO: 2976 - DNA, 20 bp, Homo Sapiens
gtaacagttgtgatgactat

SEQ ID NO: 2977 - DNA, 20 bp, Homo Sapiens
taacagttgtgatgactatg

SEQ ID NO: 2978 - DNA, 20 bp, Homo Sapiens
aacagttgtgatgactatgt

SEQ ID NO: 2979 - DNA, 20 bp, Homo Sapiens
acagttgtgatgactatgtt

SEQ ID NO: 2980 - DNA, 20 bp, Homo Sapiens
cagttgtgatgactatgttt

SEQ ID NO: 2981 - DNA, 20 bp, Homo Sapiens
agttgtgatgactatgtttc

SEQ ID NO: 2982 - DNA, 20 bp, Homo Sapiens
gttgtgatgactatgtttct

SEQ ID NO: 2983 - DNA, 20 bp, Homo Sapiens
ttgtgatgactatgtttcta

SEQ ID NO: 2984 - DNA, 20 bp, Homo Sapiens
tgtgatgactatgtttctat

SEQ ID NO: 2985 - DNA, 20 bp, Homo Sapiens
gtgatgactatgtttctatt

SEQ ID NO: 2986 - DNA, 20 bp, Homo Sapiens
tgatgactatgtttctattc

SEQ ID NO: 2987 - DNA, 20 bp, Homo Sapiens
gatgactatgtttctattct

SEQ ID NO: 2988 - DNA, 20 bp, Homo Sapiens
atgactatgtttctattcta

SEQ ID NO: 2989 - DNA, 20 bp, Homo Sapiens
tgactatgtttctattctaa

SEQ ID NO: 2990 - DNA, 20 bp, Homo Sapiens
gactatgtttctattctaag

SEQ ID NO: 2991 - DNA, 20 bp, Homo Sapiens
actatgtttctattctaagt

SEQ ID NO: 2992 - DNA, 20 bp, Homo Sapiens
ctatgtttctattctaagta

SEQ ID NO: 2993 - DNA, 20 bp, Homo Sapiens
tatgtttctattctaagtaa

SEQ ID NO: 2994 - DNA, 20 bp, Homo Sapiens
atgtttctattctaagtaat

SEQ ID NO: 2995 - DNA, 20 bp, Homo Sapiens
tgtttctattctaagtaatt

SEQ ID NO: 2996 - DNA, 20 bp, Homo Sapiens
gtttctattctaagtaattc

SEQ ID NO: 2997 - DNA, 20 bp, Homo Sapiens
tttctattctaagtaattcc

SEQ ID NO: 2998 - DNA, 20 bp, Homo Sapiens
ttctattctaagtaattcct

SEQ ID NO: 2999 - DNA, 20 bp, Homo Sapiens
tctattctaagtaattcctg

SEQ ID NO: 3000 - DNA, 20 bp, Homo Sapiens
ctattctaagtaattcctgt

SEQ ID NO: 3001 - DNA, 20 bp, Homo Sapiens
tattctaagtaattcctgta

SEQ ID NO: 3002 - DNA, 20 bp, Homo Sapiens
attctaagtaattcctgtat

SEQ ID NO: 3003 - DNA, 20 bp, Homo Sapiens
ttctaagtaattcctgtatt

SEQ ID NO: 3004 - DNA, 20 bp, Homo Sapiens
tctaagtaattcctgtattc

SEQ ID NO: 3005 - DNA, 20 bp, Homo Sapiens
ctaagtaattcctgtattct

SEQ ID NO: 3006 - DNA, 20 bp, Homo Sapiens
taagtaattcctgtattcta

SEQ ID NO: 3007 - DNA, 20 bp, Homo Sapiens
aagtaattcctgtattctac

SEQ ID NO: 3008 - DNA, 20 bp, Homo Sapiens
agtaattcctgtattctaca

SEQ ID NO: 3009 - DNA, 20 bp, Homo Sapiens
gtaattcctgtattctacag

SEQ ID NO: 3010 - DNA, 20 bp, Homo Sapiens
taattcctgtattctacagc

SEQ ID NO: 3011 - DNA, 20 bp, Homo Sapiens
aattcctgtattctacagca

SEQ ID NO: 3012 - DNA, 20 bp, Homo Sapiens
attcctgtattctacagcag

SEQ ID NO: 3013 - DNA, 20 bp, Homo Sapiens
ttcctgtattctacagcaga

SEQ ID NO: 3014 - DNA, 20 bp, Homo Sapiens
tcctgtattctacagcagat

SEQ ID NO: 3015 - DNA, 20 bp, Homo Sapiens
cctgtattctacagcagata

SEQ ID NO: 3016 - DNA, 20 bp, Homo Sapiens
ctgtattctacagcagatac

SEQ ID NO: 3017 - DNA, 20 bp, Homo Sapiens
tgtattctacagcagatact

SEQ ID NO: 3018 - DNA, 20 bp, Homo Sapiens
gtattctacagcagatactt

SEQ ID NO: 3019 - DNA, 20 bp, Homo Sapiens
tattctacagcagatacttt

SEQ ID NO: 3020 - DNA, 20 bp, Homo Sapiens
attctacagcagatactttg

SEQ ID NO: 3021 - DNA, 20 bp, Homo Sapiens
ttctacagcagatactttgt

SEQ ID NO: 3022 - DNA, 20 bp, Homo Sapiens
tctacagcagatactttgtc

SEQ ID NO: 3023 - DNA, 20 bp, Homo Sapiens
ctacagcagatactttgtca

SEQ ID NO: 3024 - DNA, 20 bp, Homo Sapiens
tacagcagatactttgtcag

SEQ ID NO: 3025 - DNA, 20 bp, Homo Sapiens
acagcagatactttgtcagc

SEQ ID NO: 3026 - DNA, 20 bp, Homo Sapiens
cagcagatactttgtcagca

SEQ ID NO: 3027 - DNA, 20 bp, Homo Sapiens
agcagatactttgtcagcaa

SEQ ID NO: 3028 - DNA, 20 bp, Homo Sapiens
gcagatactttgtcagcaat

SEQ ID NO: 3029 - DNA, 20 bp, Homo Sapiens
cagatactttgtcagcaata

SEQ ID NO: 3030 - DNA, 20 bp, Homo Sapiens
agatactttgtcagcaatac

SEQ ID NO: 3031 - DNA, 20 bp, Homo Sapiens
gatactttgtcagcaatact

SEQ ID NO: 3032 - DNA, 20 bp, Homo Sapiens
atactttgtcagcaatacta

SEQ ID NO: 3033 - DNA, 20 bp, Homo Sapiens
tactttgtcagcaatactaa

SEQ ID NO: 3034 - DNA, 20 bp, Homo Sapiens
actttgtcagcaatactaag

SEQ ID NO: 3035 - DNA, 20 bp, Homo Sapiens
ctttgtcagcaatactaagg

SEQ ID NO: 3036 - DNA, 20 bp, Homo Sapiens
tttgtcagcaatactaaggg

SEQ ID NO: 3037 - DNA, 20 bp, Homo Sapiens
ttgtcagcaatactaaggga

SEQ ID NO: 3038 - DNA, 20 bp, Homo Sapiens
tgtcagcaatactaagggaa

SEQ ID NO: 3039 - DNA, 20 bp, Homo Sapiens
gtcagcaatactaagggaag

SEQ ID NO: 3040 - DNA, 20 bp, Homo Sapiens
tcagcaatactaagggaaga

SEQ ID NO: 3041 - DNA, 20 bp, Homo Sapiens
cagcaatactaagggaagaa

SEQ ID NO: 3042 - DNA, 20 bp, Homo Sapiens
agcaatactaagggaagaaa

SEQ ID NO: 3043 - DNA, 20 bp, Homo Sapiens
gcaatactaagggaagaaac

SEQ ID NO: 3044 - DNA, 20 bp, Homo Sapiens
caatactaagggaagaaaca

SEQ ID NO: 3045 - DNA, 20 bp, Homo Sapiens
aatactaagggaagaaacaa

SEQ ID NO: 3046 - DNA, 20 bp, Homo Sapiens
atactaagggaagaaacaaa

SEQ ID NO: 3047 - DNA, 20 bp, Homo Sapiens
tactaagggaagaaacaaag

SEQ ID NO: 3048 - DNA, 20 bp, Homo Sapiens
actaagggaagaaacaaagt

SEQ ID NO: 3049 - DNA, 20 bp, Homo Sapiens
ctaagggaagaaacaaagtt

SEQ ID NO: 3050 - DNA, 20 bp, Homo Sapiens
taagggaagaaacaaagttg

SEQ ID NO: 3051 - DNA, 20 bp, Homo Sapiens
aagggaagaaacaaagttga

SEQ ID NO: 3052 - DNA, 20 bp, Homo Sapiens
agggaagaaacaaagttgaa

SEQ ID NO: 3053 - DNA, 20 bp, Homo Sapiens
gggaagaaacaaagttgaac

SEQ ID NO: 3054 - DNA, 20 bp, Homo Sapiens
ggaagaaacaaagttgaacc

SEQ ID NO: 3055 - DNA, 20 bp, Homo Sapiens
gaagaaacaaagttgaaccg

SEQ ID NO: 3056 - DNA, 20 bp, Homo Sapiens
aagaaacaaagttgaaccgt

SEQ ID NO: 3057 - DNA, 20 bp, Homo Sapiens
agaaacaaagttgaaccgtt

SEQ ID NO: 3058 - DNA, 20 bp, Homo Sapiens
gaaacaaagttgaaccgttt

SEQ ID NO: 3059 - DNA, 20 bp, Homo Sapiens
aaacaaagttgaaccgtttc

SEQ ID NO: 3060 - DNA, 20 bp, Homo Sapiens
aacaaagttgaaccgtttct

SEQ ID NO: 3061 - DNA, 20 bp, Homo Sapiens
acaaagttgaaccgtttctt

SEQ ID NO: 3062 - DNA, 20 bp, Homo Sapiens
caaagttgaaccgtttcttt

SEQ ID NO: 3063 - DNA, 20 bp, Homo Sapiens
aaagttgaaccgtttcttta

SEQ ID NO: 3064 - DNA, 20 bp, Homo Sapiens
aagttgaaccgtttctttaa

SEQ ID NO: 3065 - DNA, 20 bp, Homo Sapiens
agttgaaccgtttctttaat

SEQ ID NO: 3066 - DNA, 20 bp, Homo Sapiens
gttgaaccgtttctttaata

SEQ ID NO: 3067 - DNA, 20 bp, Homo Sapiens
ttgaaccgtttctttaataa

SEQ ID NO: 3068 - DNA, 20 bp, Homo Sapiens
agtcattgccgaggaaggct

SEQ ID NO: 3069 - DNA, 20 bp, Homo Sapiens
gtcattgccgaggaaggctt

SEQ ID NO: 3070 - DNA, 20 bp, Homo Sapiens
tcattgccgaggaaggcttg

SEQ ID NO: 3071 - DNA, 20 bp, Homo Sapiens
cattgccgaggaaggcttgc

SEQ ID NO: 3072 - DNA, 20 bp, Homo Sapiens
attgccgaggaaggcttgca

SEQ ID NO: 3073 - DNA, 20 bp, Homo Sapiens
ttgccgaggaaggcttgcac

SEQ ID NO: 3074 - DNA, 20 bp, Homo Sapiens
tgccgaggaaggcttgcaca

SEQ ID NO: 3075 - DNA, 20 bp, Homo Sapiens
gccgaggaaggcttgcacag

SEQ ID NO: 3076 - DNA, 20 bp, Homo Sapiens
ccgaggaaggcttgcacagg

SEQ ID NO: 3077 - DNA, 20 bp, Homo Sapiens
cgaggaaggcttgcacaggg

SEQ ID NO: 3078 - DNA, 20 bp, Homo Sapiens
gaggaaggcttgcacagggt

SEQ ID NO: 3079 - DNA, 20 bp, Homo Sapiens
aggaaggcttgcacagggtg

SEQ ID NO: 3080 - DNA, 20 bp, Homo Sapiens
ggaaggcttgcacagggtga

SEQ ID NO: 3081 - DNA, 20 bp, Homo Sapiens
gaaggcttgcacagggtgaa

SEQ ID NO: 3082 - DNA, 20 bp, Homo Sapiens
aaggcttgcacagggtgaaa

SEQ ID NO: 3083 - DNA, 20 bp, Homo Sapiens
aggcttgcacagggtgaaag

SEQ ID NO: 3084 - DNA, 20 bp, Homo Sapiens
ggcttgcacagggtgaaagc

SEQ ID NO: 3085 - DNA, 20 bp, Homo Sapiens
gcttgcacagggtgaaagct

SEQ ID NO: 3086 - DNA, 20 bp, Homo Sapiens
cttgcacagggtgaaagctt

SEQ ID NO: 3087 - DNA, 20 bp, Homo Sapiens
ttgcacagggtgaaagcttt

SEQ ID NO: 3088 - DNA, 20 bp, Homo Sapiens
tgcacagggtgaaagctttg

SEQ ID NO: 3089 - DNA, 20 bp, Homo Sapiens
gcacagggtgaaagctttgc

SEQ ID NO: 3090 - DNA, 20 bp, Homo Sapiens
cacagggtgaaagctttgct

SEQ ID NO: 3091 - DNA, 20 bp, Homo Sapiens
acagggtgaaagctttgctt

SEQ ID NO: 3092 - DNA, 20 bp, Homo Sapiens
cagggtgaaagctttgcttc

SEQ ID NO: 3093 - DNA, 20 bp, Homo Sapiens
agggtgaaagctttgcttct

SEQ ID NO: 3094 - DNA, 20 bp, Homo Sapiens
gggtgaaagctttgcttctc

SEQ ID NO: 3095 - DNA, 20 bp, Homo Sapiens
ggtgaaagctttgcttctct

SEQ ID NO: 3096 - DNA, 20 bp, Homo Sapiens
gtgaaagctttgcttctctg

SEQ ID NO: 3097 - DNA, 20 bp, Homo Sapiens
tgaaagctttgcttctctgc

SEQ ID NO: 3098 - DNA, 20 bp, Homo Sapiens
gaaagctttgcttctctgct

SEQ ID NO: 3099 - DNA, 20 bp, Homo Sapiens
aaagctttgcttctctgctg

SEQ ID NO: 3100 - DNA, 20 bp, Homo Sapiens
aagctttgcttctctgctgc

SEQ ID NO: 3101 - DNA, 20 bp, Homo Sapiens
agctttgcttctctgctgct

SEQ ID NO: 3102 - DNA, 20 bp, Homo Sapiens
gctttgcttctctgctgctg

SEQ ID NO: 3103 - DNA, 20 bp, Homo Sapiens
ctttgcttctctgctgctgt

SEQ ID NO: 3104 - DNA, 20 bp, Homo Sapiens
tttgcttctctgctgctgta

SEQ ID NO: 3105 - DNA, 20 bp, Homo Sapiens
ttgcttctctgctgctgtaa

SEQ ID NO: 3106 - DNA, 20 bp, Homo Sapiens
tgcttctctgctgctgtaac

SEQ ID NO: 3107 - DNA, 20 bp, Homo Sapiens
gcttctctgctgctgtaaca

SEQ ID NO: 3108 - DNA, 20 bp, Homo Sapiens
cttctctgctgctgtaacag

SEQ ID NO: 3109 - DNA, 20 bp, Homo Sapiens
ttctctgctgctgtaacagg

SEQ ID NO: 3110 - DNA, 20 bp, Homo Sapiens
tctctgctgctgtaacaggg

SEQ ID NO: 3111 - DNA, 20 bp, Homo Sapiens
ctctgctgctgtaacaggga

SEQ ID NO: 3112 - DNA, 20 bp, Homo Sapiens
tctgctgctgtaacagggac

SEQ ID NO: 3113 - DNA, 20 bp, Homo Sapiens
ctgctgctgtaacagggact

SEQ ID NO: 3114 - DNA, 20 bp, Homo Sapiens
tgctgctgtaacagggacta

SEQ ID NO: 3115 - DNA, 20 bp, Homo Sapiens
gctgctgtaacagggactag

SEQ ID NO: 3116 - DNA, 20 bp, Homo Sapiens
ctgctgtaacagggactagc

SEQ ID NO: 3117 - DNA, 20 bp, Homo Sapiens
tgctgtaacagggactagca

SEQ ID NO: 3118 - DNA, 20 bp, Homo Sapiens
gctgtaacagggactagcac

SEQ ID NO: 3119 - DNA, 20 bp, Homo Sapiens
ctgtaacagggactagcaca

SEQ ID NO: 3120 - DNA, 20 bp, Homo Sapiens
tgtaacagggactagcacag

SEQ ID NO: 3121 - DNA, 20 bp, Homo Sapiens
gtaacagggactagcacaga

SEQ ID NO: 3122 - DNA, 20 bp, Homo Sapiens
taacagggactagcacagac

SEQ ID NO: 3123 - DNA, 20 bp, Homo Sapiens
aacagggactagcacagaca

SEQ ID NO: 3124 - DNA, 20 bp, Homo Sapiens
acagggactagcacagacac

SEQ ID NO: 3125 - DNA, 20 bp, Homo Sapiens
cagggactagcacagacaca

SEQ ID NO: 3126 - DNA, 20 bp, Homo Sapiens
agggactagcacagacacac

SEQ ID NO: 3127 - DNA, 20 bp, Homo Sapiens
gggactagcacagacacacg

SEQ ID NO: 3128 - DNA, 20 bp, Homo Sapiens
ggactagcacagacacacgg

SEQ ID NO: 3129 - DNA, 20 bp, Homo Sapiens
gactagcacagacacacgga

SEQ ID NO: 3130 - DNA, 20 bp, Homo Sapiens
actagcacagacacacggat

SEQ ID NO: 3131 - DNA, 20 bp, Homo Sapiens
ctagcacagacacacggatg

SEQ ID NO: 3132 - DNA, 20 bp, Homo Sapiens
tagcacagacacacggatga

SEQ ID NO: 3133 - DNA, 20 bp, Homo Sapiens
agcacagacacacggatgag

SEQ ID NO: 3134 - DNA, 20 bp, Homo Sapiens
gcacagacacacggatgagt

SEQ ID NO: 3135 - DNA, 20 bp, Homo Sapiens
cacagacacacggatgagtg

SEQ ID NO: 3136 - DNA, 20 bp, Homo Sapiens
acagacacacggatgagtgg

SEQ ID NO: 3137 - DNA, 20 bp, Homo Sapiens
cagacacacggatgagtggg

SEQ ID NO: 3138 - DNA, 20 bp, Homo Sapiens
agacacacggatgagtgggg

SEQ ID NO: 3139 - DNA, 20 bp, Homo Sapiens
gacacacggatgagtggggt

SEQ ID NO: 3140 - DNA, 20 bp, Homo Sapiens
acacacggatgagtggggtc

SEQ ID NO: 3141 - DNA, 20 bp, Homo Sapiens
cacacggatgagtggggtca

SEQ ID NO: 3142 - DNA, 20 bp, Homo Sapiens
acacggatgagtggggtcat

SEQ ID NO: 3143 - DNA, 20 bp, Homo Sapiens
cacggatgagtggggtcatt

SEQ ID NO: 3144 - DNA, 20 bp, Homo Sapiens
acggatgagtggggtcattt

SEQ ID NO: 3145 - DNA, 20 bp, Homo Sapiens
cggatgagtggggtcatttc

SEQ ID NO: 3146 - DNA, 20 bp, Homo Sapiens
ggatgagtggggtcatttcc

SEQ ID NO: 3147 - DNA, 20 bp, Homo Sapiens
gatgagtggggtcatttcca

SEQ ID NO: 3148 - DNA, 20 bp, Homo Sapiens
atgagtggggtcatttccag

SEQ ID NO: 3149 - DNA, 20 bp, Homo Sapiens
tgagtggggtcatttccaga

SEQ ID NO: 3150 - DNA, 20 bp, Homo Sapiens
gagtggggtcatttccagat

SEQ ID NO: 3151 - DNA, 20 bp, Homo Sapiens
agtggggtcatttccagata

SEQ ID NO: 3152 - DNA, 20 bp, Homo Sapiens
gtggggtcatttccagatat

SEQ ID NO: 3153 - DNA, 20 bp, Homo Sapiens
tggggtcatttccagatatt

SEQ ID NO: 3154 - DNA, 20 bp, Homo Sapiens
ggggtcatttccagatatta

SEQ ID NO: 3155 - DNA, 20 bp, Homo Sapiens
gggtcatttccagatattag

SEQ ID NO: 3156 - DNA, 20 bp, Homo Sapiens
ggtcatttccagatattagg

SEQ ID NO: 3157 - DNA, 20 bp, Homo Sapiens
gtcatttccagatattaggt

SEQ ID NO: 3158 - DNA, 20 bp, Homo Sapiens
tcatttccagatattaggtc

SEQ ID NO: 3159 - DNA, 20 bp, Homo Sapiens
catttccagatattaggtca

SEQ ID NO: 3160 - DNA, 20 bp, Homo Sapiens
atttccagatattaggtcac

SEQ ID NO: 3161 - DNA, 20 bp, Homo Sapiens
tttccagatattaggtcaca

SEQ ID NO: 3162 - DNA, 20 bp, Homo Sapiens
ttccagatattaggtcacag

SEQ ID NO: 3163 - DNA, 20 bp, Homo Sapiens
tccagatattaggtcacagc

SEQ ID NO: 3164 - DNA, 20 bp, Homo Sapiens
ccagatattaggtcacagca

SEQ ID NO: 3165 - DNA, 20 bp, Homo Sapiens
cagatattaggtcacagcag

SEQ ID NO: 3166 - DNA, 20 bp, Homo Sapiens
agatattaggtcacagcaga

SEQ ID NO: 3167 - DNA, 20 bp, Homo Sapiens
gatattaggtcacagcagaa

SEQ ID NO: 3168 - DNA, 20 bp, Homo Sapiens
atattaggtcacagcagaag

SEQ ID NO: 3169 - DNA, 20 bp, Homo Sapiens
tattaggtcacagcagaagc

SEQ ID NO: 3170 - DNA, 20 bp, Homo Sapiens
attaggtcacagcagaagca

SEQ ID NO: 3171 - DNA, 20 bp, Homo Sapiens
ttaggtcacagcagaagcag

SEQ ID NO: 3172 - DNA, 20 bp, Homo Sapiens
taggtcacagcagaagcagc

SEQ ID NO: 3173 - DNA, 20 bp, Homo Sapiens
aggtcacagcagaagcagcc

SEQ ID NO: 3174 - DNA, 20 bp, Homo Sapiens
ggtcacagcagaagcagcca

SEQ ID NO: 3175 - DNA, 20 bp, Homo Sapiens
gtcacagcagaagcagccaa

SEQ ID NO: 3176 - DNA, 20 bp, Homo Sapiens
tcacagcagaagcagccaaa

SEQ ID NO: 3177 - DNA, 20 bp, Homo Sapiens
cacagcagaagcagccaaaa

SEQ ID NO: 3178 - DNA, 20 bp, Homo Sapiens
acagcagaagcagccaaaat

SEQ ID NO: 3179 - DNA, 20 bp, Homo Sapiens
cagcagaagcagccaaaatg

SEQ ID NO: 3180 - DNA, 20 bp, Homo Sapiens
agcagaagcagccaaaatgg

SEQ ID NO: 3181 - DNA, 20 bp, Homo Sapiens
gcagaagcagccaaaatgga

SEQ ID NO: 3182 - DNA, 20 bp, Homo Sapiens
cagaagcagccaaaatggat

SEQ ID NO: 3183 - DNA, 20 bp, Homo Sapiens
agaagcagccaaaatggatc

SEQ ID NO: 3184 - DNA, 20 bp, Homo Sapiens
gaagcagccaaaatggatcc

SEQ ID NO: 3185 - DNA, 20 bp, Homo Sapiens
aagcagccaaaatggatccc

SEQ ID NO: 3186 - DNA, 20 bp, Homo Sapiens
agcagccaaaatggatcccc

SEQ ID NO: 3187 - DNA, 20 bp, Homo Sapiens
gcagccaaaatggatcccca

SEQ ID NO: 3188 - DNA, 20 bp, Homo Sapiens
cagccaaaatggatccccag

SEQ ID NO: 3189 - DNA, 20 bp, Homo Sapiens
agccaaaatggatccccagt

SEQ ID NO: 3190 - DNA, 20 bp, Homo Sapiens
gccaaaatggatccccagtg

SEQ ID NO: 3191 - DNA, 20 bp, Homo Sapiens
ccaaaatggatccccagtgc

SEQ ID NO: 3192 - DNA, 20 bp, Homo Sapiens
caaaatggatccccagtgca

SEQ ID NO: 3193 - DNA, 20 bp, Homo Sapiens
aaaatggatccccagtgcac

SEQ ID NO: 3194 - DNA, 20 bp, Homo Sapiens
aaatggatccccagtgcact

SEQ ID NO: 3195 - DNA, 20 bp, Homo Sapiens
aatggatccccagtgcacta

SEQ ID NO: 3196 - DNA, 20 bp, Homo Sapiens
atggatccccagtgcactat

SEQ ID NO: 3197 - DNA, 20 bp, Homo Sapiens
tggatccccagtgcactatg

SEQ ID NO: 3198 - DNA, 20 bp, Homo Sapiens
ggatccccagtgcactatgg

SEQ ID NO: 3199 - DNA, 20 bp, Homo Sapiens
gatccccagtgcactatggg

SEQ ID NO: 3200 - DNA, 20 bp, Homo Sapiens
atccccagtgcactatggga

SEQ ID NO: 3201 - DNA, 20 bp, Homo Sapiens
tccccagtgcactatgggac

SEQ ID NO: 3202 - DNA, 20 bp, Homo Sapiens
ccccagtgcactatgggact

SEQ ID NO: 3203 - DNA, 20 bp, Homo Sapiens
cccagtgcactatgggactg

SEQ ID NO: 3204 - DNA, 20 bp, Homo Sapiens
ccagtgcactatgggactga

SEQ ID NO: 3205 - DNA, 20 bp, Homo Sapiens
cagtgcactatgggactgag

SEQ ID NO: 3206 - DNA, 20 bp, Homo Sapiens
agtgcactatgggactgagt

SEQ ID NO: 3207 - DNA, 20 bp, Homo Sapiens
gtgcactatgggactgagta

SEQ ID NO: 3208 - DNA, 20 bp, Homo Sapiens
tgcactatgggactgagtaa

SEQ ID NO: 3209 - DNA, 20 bp, Homo Sapiens
gcactatgggactgagtaac

SEQ ID NO: 3210 - DNA, 20 bp, Homo Sapiens
cactatgggactgagtaaca

SEQ ID NO: 3211 - DNA, 20 bp, Homo Sapiens
actatgggactgagtaacat

SEQ ID NO: 3212 - DNA, 20 bp, Homo Sapiens
ctatgggactgagtaacatt

SEQ ID NO: 3213 - DNA, 20 bp, Homo Sapiens
tatgggactgagtaacattc

SEQ ID NO: 3214 - DNA, 20 bp, Homo Sapiens
atgggactgagtaacattct

SEQ ID NO: 3215 - DNA, 20 bp, Homo Sapiens
tgggactgagtaacattctc

SEQ ID NO: 3216 - DNA, 20 bp, Homo Sapiens
gggactgagtaacattctct

SEQ ID NO: 3217 - DNA, 20 bp, Homo Sapiens
ggactgagtaacattctctt

SEQ ID NO: 3218 - DNA, 20 bp, Homo Sapiens
gactgagtaacattctcttt

SEQ ID NO: 3219 - DNA, 20 bp, Homo Sapiens
actgagtaacattctctttg

SEQ ID NO: 3220 - DNA, 20 bp, Homo Sapiens
ctgagtaacattctctttgt

SEQ ID NO: 3221 - DNA, 20 bp, Homo Sapiens
tgagtaacattctctttgtg

SEQ ID NO: 3222 - DNA, 20 bp, Homo Sapiens
gagtaacattctctttgtga

SEQ ID NO: 3223 - DNA, 20 bp, Homo Sapiens
agtaacattctctttgtgat

SEQ ID NO: 3224 - DNA, 20 bp, Homo Sapiens
gtaacattctctttgtgatg

SEQ ID NO: 3225 - DNA, 20 bp, Homo Sapiens
taacattctctttgtgatgg

SEQ ID NO: 3226 - DNA, 20 bp, Homo Sapiens
aacattctctttgtgatggc

SEQ ID NO: 3227 - DNA, 20 bp, Homo Sapiens
acattctctttgtgatggcc

SEQ ID NO: 3228 - DNA, 20 bp, Homo Sapiens
cattctctttgtgatggcct

SEQ ID NO: 3229 - DNA, 20 bp, Homo Sapiens
attctctttgtgatggcctt

SEQ ID NO: 3230 - DNA, 20 bp, Homo Sapiens
ttctctttgtgatggccttc

SEQ ID NO: 3231 - DNA, 20 bp, Homo Sapiens
tctctttgtgatggccttcc

SEQ ID NO: 3232 - DNA, 20 bp, Homo Sapiens
ctctttgtgatggccttcct

SEQ ID NO: 3233 - DNA, 20 bp, Homo Sapiens
tctttgtgatggccttcctg

SEQ ID NO: 3234 - DNA, 20 bp, Homo Sapiens
ctttgtgatggccttcctgc

SEQ ID NO: 3235 - DNA, 20 bp, Homo Sapiens
tttgtgatggccttcctgct

SEQ ID NO: 3236 - DNA, 20 bp, Homo Sapiens
ttgtgatggccttcctgctc

SEQ ID NO: 3237 - DNA, 20 bp, Homo Sapiens
tgtgatggccttcctgctct

SEQ ID NO: 3238 - DNA, 20 bp, Homo Sapiens
gtgatggccttcctgctctc

SEQ ID NO: 3239 - DNA, 20 bp, Homo Sapiens
tgatggccttcctgctctct

SEQ ID NO: 3240 - DNA, 20 bp, Homo Sapiens
gatggccttcctgctctctg

SEQ ID NO: 3241 - DNA, 20 bp, Homo Sapiens
atggccttcctgctctctgg

SEQ ID NO: 3242 - DNA, 20 bp, Homo Sapiens
tggccttcctgctctctggt

SEQ ID NO: 3243 - DNA, 20 bp, Homo Sapiens
ggccttcctgctctctggtg

SEQ ID NO: 3244 - DNA, 20 bp, Homo Sapiens
gccttcctgctctctggtgc

SEQ ID NO: 3245 - DNA, 20 bp, Homo Sapiens
ccttcctgctctctggtgct

SEQ ID NO: 3246 - DNA, 20 bp, Homo Sapiens
cttcctgctctctggtgctg

SEQ ID NO: 3247 - DNA, 20 bp, Homo Sapiens
ttcctgctctctggtgctgc

SEQ ID NO: 3248 - DNA, 20 bp, Homo Sapiens
tcctgctctctggtgctgct

SEQ ID NO: 3249 - DNA, 20 bp, Homo Sapiens
cctgctctctggtgctgctc

SEQ ID NO: 3250 - DNA, 20 bp, Homo Sapiens
ctgctctctggtgctgctcc

SEQ ID NO: 3251 - DNA, 20 bp, Homo Sapiens
tgctctctggtgctgctcct

SEQ ID NO: 3252 - DNA, 20 bp, Homo Sapiens
gctctctggtgctgctcctc

SEQ ID NO: 3253 - DNA, 20 bp, Homo Sapiens
ctctctggtgctgctcctct

SEQ ID NO: 3254 - DNA, 20 bp, Homo Sapiens
tctctggtgctgctcctctg

SEQ ID NO: 3255 - DNA, 20 bp, Homo Sapiens
ctctggtgctgctcctctga

SEQ ID NO: 3256 - DNA, 20 bp, Homo Sapiens
tctggtgctgctcctctgaa

SEQ ID NO: 3257 - DNA, 20 bp, Homo Sapiens
ctggtgctgctcctctgaag

SEQ ID NO: 3258 - DNA, 20 bp, Homo Sapiens
tggtgctgctcctctgaaga

SEQ ID NO: 3259 - DNA, 20 bp, Homo Sapiens
ggtgctgctcctctgaagat

SEQ ID NO: 3260 - DNA, 20 bp, Homo Sapiens
gtgctgctcctctgaagatt

SEQ ID NO: 3261 - DNA, 20 bp, Homo Sapiens
tgctgctcctctgaagattc

SEQ ID NO: 3262 - DNA, 20 bp, Homo Sapiens
gctgctcctctgaagattca

SEQ ID NO: 3263 - DNA, 20 bp, Homo Sapiens
ctgctcctctgaagattcaa

SEQ ID NO: 3264 - DNA, 20 bp, Homo Sapiens
tgctcctctgaagattcaag

SEQ ID NO: 3265 - DNA, 20 bp, Homo Sapiens
gctcctctgaagattcaagc

SEQ ID NO: 3266 - DNA, 20 bp, Homo Sapiens
ctcctctgaagattcaagct

SEQ ID NO: 3267 - DNA, 20 bp, Homo Sapiens
tcctctgaagattcaagctt

SEQ ID NO: 3268 - DNA, 20 bp, Homo Sapiens
cctctgaagattcaagctta

SEQ ID NO: 3269 - DNA, 20 bp, Homo Sapiens
ctctgaagattcaagcttat

SEQ ID NO: 3270 - DNA, 20 bp, Homo Sapiens
tctgaagattcaagcttatt

SEQ ID NO: 3271 - DNA, 20 bp, Homo Sapiens
ctgaagattcaagcttattt

SEQ ID NO: 3272 - DNA, 20 bp, Homo Sapiens
tgaagattcaagcttatttc

SEQ ID NO: 3273 - DNA, 20 bp, Homo Sapiens
gaagattcaagcttatttca

SEQ ID NO: 3274 - DNA, 20 bp, Homo Sapiens
aagattcaagcttatttcaa

SEQ ID NO: 3275 - DNA, 20 bp, Homo Sapiens
agattcaagcttatttcaat

SEQ ID NO: 3276 - DNA, 20 bp, Homo Sapiens
gattcaagcttatttcaatg

SEQ ID NO: 3277 - DNA, 20 bp, Homo Sapiens
attcaagcttatttcaatga

SEQ ID NO: 3278 - DNA, 20 bp, Homo Sapiens
ttcaagcttatttcaatgag

SEQ ID NO: 3279 - DNA, 20 bp, Homo Sapiens
tcaagcttatttcaatgaga

SEQ ID NO: 3280 - DNA, 20 bp, Homo Sapiens
caagcttatttcaatgagac

SEQ ID NO: 3281 - DNA, 20 bp, Homo Sapiens
aagcttatttcaatgagact

SEQ ID NO: 3282 - DNA, 20 bp, Homo Sapiens
agcttatttcaatgagactg

SEQ ID NO: 3283 - DNA, 20 bp, Homo Sapiens
gcttatttcaatgagactgc

SEQ ID NO: 3284 - DNA, 20 bp, Homo Sapiens
cttatttcaatgagactgca

SEQ ID NO: 3285 - DNA, 20 bp, Homo Sapiens
ttatttcaatgagactgcag

SEQ ID NO: 3286 - DNA, 20 bp, Homo Sapiens
tatttcaatgagactgcaga

SEQ ID NO: 3287 - DNA, 20 bp, Homo Sapiens
atttcaatgagactgcagac

SEQ ID NO: 3288 - DNA, 20 bp, Homo Sapiens
tttcaatgagactgcagacc

SEQ ID NO: 3289 - DNA, 20 bp, Homo Sapiens
ttcaatgagactgcagacct

SEQ ID NO: 3290 - DNA, 20 bp, Homo Sapiens
tcaatgagactgcagacctg

SEQ ID NO: 3291 - DNA, 20 bp, Homo Sapiens
caatgagactgcagacctgc

SEQ ID NO: 3292 - DNA, 20 bp, Homo Sapiens
aatgagactgcagacctgcc

SEQ ID NO: 3293 - DNA, 20 bp, Homo Sapiens
atgagactgcagacctgcca

SEQ ID NO: 3294 - DNA, 20 bp, Homo Sapiens
tgagactgcagacctgccat

SEQ ID NO: 3295 - DNA, 20 bp, Homo Sapiens
gagactgcagacctgccatg

SEQ ID NO: 3296 - DNA, 20 bp, Homo Sapiens
agactgcagacctgccatgc

SEQ ID NO: 3297 - DNA, 20 bp, Homo Sapiens
gactgcagacctgccatgcc

SEQ ID NO: 3298 - DNA, 20 bp, Homo Sapiens
actgcagacctgccatgcca

SEQ ID NO: 3299 - DNA, 20 bp, Homo Sapiens
ctgcagacctgccatgccaa

SEQ ID NO: 3300 - DNA, 20 bp, Homo Sapiens
tgcagacctgccatgccaat

SEQ ID NO: 3301 - DNA, 20 bp, Homo Sapiens
gcagacctgccatgccaatt

SEQ ID NO: 3302 - DNA, 20 bp, Homo Sapiens
cagacctgccatgccaattt

SEQ ID NO: 3303 - DNA, 20 bp, Homo Sapiens
agacctgccatgccaatttg

SEQ ID NO: 3304 - DNA, 20 bp, Homo Sapiens
gacctgccatgccaatttgc

SEQ ID NO: 3305 - DNA, 20 bp, Homo Sapiens
acctgccatgccaatttgca

SEQ ID NO: 3306 - DNA, 20 bp, Homo Sapiens
cctgccatgccaatttgcaa

SEQ ID NO: 3307 - DNA, 20 bp, Homo Sapiens
ctgccatgccaatttgcaaa

SEQ ID NO: 3308 - DNA, 20 bp, Homo Sapiens
tgccatgccaatttgcaaac

SEQ ID NO: 3309 - DNA, 20 bp, Homo Sapiens
gccatgccaatttgcaaact

SEQ ID NO: 3310 - DNA, 20 bp, Homo Sapiens
ccatgccaatttgcaaactc

SEQ ID NO: 3311 - DNA, 20 bp, Homo Sapiens
catgccaatttgcaaactct

SEQ ID NO: 3312 - DNA, 20 bp, Homo Sapiens
atgccaatttgcaaactctc

SEQ ID NO: 3313 - DNA, 20 bp, Homo Sapiens
tgccaatttgcaaactctca

SEQ ID NO: 3314 - DNA, 20 bp, Homo Sapiens
gccaatttgcaaactctcaa

SEQ ID NO: 3315 - DNA, 20 bp, Homo Sapiens
ccaatttgcaaactctcaaa

SEQ ID NO: 3316 - DNA, 20 bp, Homo Sapiens
caatttgcaaactctcaaaa

SEQ ID NO: 3317 - DNA, 20 bp, Homo Sapiens
aatttgcaaactctcaaaac

SEQ ID NO: 3318 - DNA, 20 bp, Homo Sapiens
atttgcaaactctcaaaacc

SEQ ID NO: 3319 - DNA, 20 bp, Homo Sapiens
tttgcaaactctcaaaacca

SEQ ID NO: 3320 - DNA, 20 bp, Homo Sapiens
ttgcaaactctcaaaaccaa

SEQ ID NO: 3321 - DNA, 20 bp, Homo Sapiens
tgcaaactctcaaaaccaaa

SEQ ID NO: 3322 - DNA, 20 bp, Homo Sapiens
gcaaactctcaaaaccaaag

SEQ ID NO: 3323 - DNA, 20 bp, Homo Sapiens
caaactctcaaaaccaaagc

SEQ ID NO: 3324 - DNA, 20 bp, Homo Sapiens
aaactctcaaaaccaaagcc

SEQ ID NO: 3325 - DNA, 20 bp, Homo Sapiens
aactctcaaaaccaaagcct

SEQ ID NO: 3326 - DNA, 20 bp, Homo Sapiens
actctcaaaaccaaagcctg

SEQ ID NO: 3327 - DNA, 20 bp, Homo Sapiens
ctctcaaaaccaaagcctga

SEQ ID NO: 3328 - DNA, 20 bp, Homo Sapiens
tctcaaaaccaaagcctgag

SEQ ID NO: 3329 - DNA, 20 bp, Homo Sapiens
ctcaaaaccaaagcctgagt

SEQ ID NO: 3330 - DNA, 20 bp, Homo Sapiens
tcaaaaccaaagcctgagtg

SEQ ID NO: 3331 - DNA, 20 bp, Homo Sapiens
caaaaccaaagcctgagtga

SEQ ID NO: 3332 - DNA, 20 bp, Homo Sapiens
aaaaccaaagcctgagtgag

SEQ ID NO: 3333 - DNA, 20 bp, Homo Sapiens
aaaccaaagcctgagtgagc

SEQ ID NO: 3334 - DNA, 20 bp, Homo Sapiens
aaccaaagcctgagtgagct

SEQ ID NO: 3335 - DNA, 20 bp, Homo Sapiens
accaaagcctgagtgagcta

SEQ ID NO: 3336 - DNA, 20 bp, Homo Sapiens
ccaaagcctgagtgagctag

SEQ ID NO: 3337 - DNA, 20 bp, Homo Sapiens
caaagcctgagtgagctagt

SEQ ID NO: 3338 - DNA, 20 bp, Homo Sapiens
aaagcctgagtgagctagta

SEQ ID NO: 3339 - DNA, 20 bp, Homo Sapiens
aagcctgagtgagctagtag

SEQ ID NO: 3340 - DNA, 20 bp, Homo Sapiens
agcctgagtgagctagtagt

SEQ ID NO: 3341 - DNA, 20 bp, Homo Sapiens
gcctgagtgagctagtagta

SEQ ID NO: 3342 - DNA, 20 bp, Homo Sapiens
cctgagtgagctagtagtat

SEQ ID NO: 3343 - DNA, 20 bp, Homo Sapiens
ctgagtgagctagtagtatt

SEQ ID NO: 3344 - DNA, 20 bp, Homo Sapiens
tgagtgagctagtagtattt

SEQ ID NO: 3345 - DNA, 20 bp, Homo Sapiens
gagtgagctagtagtatttt

SEQ ID NO: 3346 - DNA, 20 bp, Homo Sapiens
agtgagctagtagtattttg

SEQ ID NO: 3347 - DNA, 20 bp, Homo Sapiens
gtgagctagtagtattttgg

SEQ ID NO: 3348 - DNA, 20 bp, Homo Sapiens
tgagctagtagtattttggc

SEQ ID NO: 3349 - DNA, 20 bp, Homo Sapiens
gagctagtagtattttggca

SEQ ID NO: 3350 - DNA, 20 bp, Homo Sapiens
agctagtagtattttggcag

SEQ ID NO: 3351 - DNA, 20 bp, Homo Sapiens
gctagtagtattttggcagg

SEQ ID NO: 3352 - DNA, 20 bp, Homo Sapiens
ctagtagtattttggcagga

SEQ ID NO: 3353 - DNA, 20 bp, Homo Sapiens
tagtagtattttggcaggac

SEQ ID NO: 3354 - DNA, 20 bp, Homo Sapiens
agtagtattttggcaggacc

SEQ ID NO: 3355 - DNA, 20 bp, Homo Sapiens
gtagtattttggcaggacca

SEQ ID NO: 3356 - DNA, 20 bp, Homo Sapiens
tagtattttggcaggaccag

SEQ ID NO: 3357 - DNA, 20 bp, Homo Sapiens
agtattttggcaggaccagg

SEQ ID NO: 3358 - DNA, 20 bp, Homo Sapiens
gtattttggcaggaccagga

SEQ ID NO: 3359 - DNA, 20 bp, Homo Sapiens
tattttggcaggaccaggaa

SEQ ID NO: 3360 - DNA, 20 bp, Homo Sapiens
attttggcaggaccaggaaa

SEQ ID NO: 3361 - DNA, 20 bp, Homo Sapiens
ttttggcaggaccaggaaaa

SEQ ID NO: 3362 - DNA, 20 bp, Homo Sapiens
tttggcaggaccaggaaaac

SEQ ID NO: 3363 - DNA, 20 bp, Homo Sapiens
ttggcaggaccaggaaaact

SEQ ID NO: 3364 - DNA, 20 bp, Homo Sapiens
tggcaggaccaggaaaactt

SEQ ID NO: 3365 - DNA, 20 bp, Homo Sapiens
ggcaggaccaggaaaacttg

SEQ ID NO: 3366 - DNA, 20 bp, Homo Sapiens
gcaggaccaggaaaacttgg

SEQ ID NO: 3367 - DNA, 20 bp, Homo Sapiens
caggaccaggaaaacttggt

SEQ ID NO: 3368 - DNA, 20 bp, Homo Sapiens
aggaccaggaaaacttggtt

SEQ ID NO: 3369 - DNA, 20 bp, Homo Sapiens
ggaccaggaaaacttggttc

SEQ ID NO: 3370 - DNA, 20 bp, Homo Sapiens
gaccaggaaaacttggttct

SEQ ID NO: 3371 - DNA, 20 bp, Homo Sapiens
accaggaaaacttggttctg

SEQ ID NO: 3372 - DNA, 20 bp, Homo Sapiens
ccaggaaaacttggttctga

SEQ ID NO: 3373 - DNA, 20 bp, Homo Sapiens
caggaaaacttggttctgaa

SEQ ID NO: 3374 - DNA, 20 bp, Homo Sapiens
aggaaaacttggttctgaat

SEQ ID NO: 3375 - DNA, 20 bp, Homo Sapiens
ggaaaacttggttctgaatg

SEQ ID NO: 3376 - DNA, 20 bp, Homo Sapiens
gaaaacttggttctgaatga

SEQ ID NO: 3377 - DNA, 20 bp, Homo Sapiens
aaaacttggttctgaatgag

SEQ ID NO: 3378 - DNA, 20 bp, Homo Sapiens
aaacttggttctgaatgagg

SEQ ID NO: 3379 - DNA, 20 bp, Homo Sapiens
aacttggttctgaatgaggt

SEQ ID NO: 3380 - DNA, 20 bp, Homo Sapiens
acttggttctgaatgaggta

SEQ ID NO: 3381 - DNA, 20 bp, Homo Sapiens
cttggttctgaatgaggtat

SEQ ID NO: 3382 - DNA, 20 bp, Homo Sapiens
ttggttctgaatgaggtata

SEQ ID NO: 3383 - DNA, 20 bp, Homo Sapiens
tggttctgaatgaggtatac

SEQ ID NO: 3384 - DNA, 20 bp, Homo Sapiens
ggttctgaatgaggtatact

SEQ ID NO: 3385 - DNA, 20 bp, Homo Sapiens
gttctgaatgaggtatactt

SEQ ID NO: 3386 - DNA, 20 bp, Homo Sapiens
ttctgaatgaggtatactta

SEQ ID NO: 3387 - DNA, 20 bp, Homo Sapiens
tctgaatgaggtatacttag

SEQ ID NO: 3388 - DNA, 20 bp, Homo Sapiens
ctgaatgaggtatacttagg

SEQ ID NO: 3389 - DNA, 20 bp, Homo Sapiens
tgaatgaggtatacttaggc

SEQ ID NO: 3390 - DNA, 20 bp, Homo Sapiens
gaatgaggtatacttaggca

SEQ ID NO: 3391 - DNA, 20 bp, Homo Sapiens
aatgaggtatacttaggcaa

SEQ ID NO: 3392 - DNA, 20 bp, Homo Sapiens
atgaggtatacttaggcaaa

SEQ ID NO: 3393 - DNA, 20 bp, Homo Sapiens
tgaggtatacttaggcaaag

SEQ ID NO: 3394 - DNA, 20 bp, Homo Sapiens
gaggtatacttaggcaaaga

SEQ ID NO: 3395 - DNA, 20 bp, Homo Sapiens
aggtatacttaggcaaagag

SEQ ID NO: 3396 - DNA, 20 bp, Homo Sapiens
ggtatacttaggcaaagaga

SEQ ID NO: 3397 - DNA, 20 bp, Homo Sapiens
gtatacttaggcaaagagaa

SEQ ID NO: 3398 - DNA, 20 bp, Homo Sapiens
tatacttaggcaaagagaaa

SEQ ID NO: 3399 - DNA, 20 bp, Homo Sapiens
atacttaggcaaagagaaat

SEQ ID NO: 3400 - DNA, 20 bp, Homo Sapiens
tacttaggcaaagagaaatt

SEQ ID NO: 3401 - DNA, 20 bp, Homo Sapiens
acttaggcaaagagaaattt

SEQ ID NO: 3402 - DNA, 20 bp, Homo Sapiens
cttaggcaaagagaaatttg

SEQ ID NO: 3403 - DNA, 20 bp, Homo Sapiens
ttaggcaaagagaaatttga

SEQ ID NO: 3404 - DNA, 20 bp, Homo Sapiens
taggcaaagagaaatttgac

SEQ ID NO: 3405 - DNA, 20 bp, Homo Sapiens
aggcaaagagaaatttgaca

SEQ ID NO: 3406 - DNA, 20 bp, Homo Sapiens
ggcaaagagaaatttgacag

SEQ ID NO: 3407 - DNA, 20 bp, Homo Sapiens
gcaaagagaaatttgacagt

SEQ ID NO: 3408 - DNA, 20 bp, Homo Sapiens
caaagagaaatttgacagtg

SEQ ID NO: 3409 - DNA, 20 bp, Homo Sapiens
aaagagaaatttgacagtgt

SEQ ID NO: 3410 - DNA, 20 bp, Homo Sapiens
aagagaaatttgacagtgtt

SEQ ID NO: 3411 - DNA, 20 bp, Homo Sapiens
agagaaatttgacagtgttc

SEQ ID NO: 3412 - DNA, 20 bp, Homo Sapiens
gagaaatttgacagtgttca

SEQ ID NO: 3413 - DNA, 20 bp, Homo Sapiens
agaaatttgacagtgttcat

SEQ ID NO: 3414 - DNA, 20 bp, Homo Sapiens
gaaatttgacagtgttcatt

SEQ ID NO: 3415 - DNA, 20 bp, Homo Sapiens
aaatttgacagtgttcattc

SEQ ID NO: 3416 - DNA, 20 bp, Homo Sapiens
aatttgacagtgttcattcc

SEQ ID NO: 3417 - DNA, 20 bp, Homo Sapiens
atttgacagtgttcattcca

SEQ ID NO: 3418 - DNA, 20 bp, Homo Sapiens
tttgacagtgttcattccaa

SEQ ID NO: 3419 - DNA, 20 bp, Homo Sapiens
ttgacagtgttcattccaag

SEQ ID NO: 3420 - DNA, 20 bp, Homo Sapiens
tgacagtgttcattccaagt

SEQ ID NO: 3421 - DNA, 20 bp, Homo Sapiens
gacagtgttcattccaagta

SEQ ID NO: 3422 - DNA, 20 bp, Homo Sapiens
acagtgttcattccaagtat

SEQ ID NO: 3423 - DNA, 20 bp, Homo Sapiens
cagtgttcattccaagtata

SEQ ID NO: 3424 - DNA, 20 bp, Homo Sapiens
agtgttcattccaagtatat

SEQ ID NO: 3425 - DNA, 20 bp, Homo Sapiens
gtgttcattccaagtatatg

SEQ ID NO: 3426 - DNA, 20 bp, Homo Sapiens
tgttcattccaagtatatgg

SEQ ID NO: 3427 - DNA, 20 bp, Homo Sapiens
gttcattccaagtatatggg

SEQ ID NO: 3428 - DNA, 20 bp, Homo Sapiens
ttcattccaagtatatgggc

SEQ ID NO: 3429 - DNA, 20 bp, Homo Sapiens
tcattccaagtatatgggcc

SEQ ID NO: 3430 - DNA, 20 bp, Homo Sapiens
cattccaagtatatgggccg

SEQ ID NO: 3431 - DNA, 20 bp, Homo Sapiens
attccaagtatatgggccgc

SEQ ID NO: 3432 - DNA, 20 bp, Homo Sapiens
ttccaagtatatgggccgca

SEQ ID NO: 3433 - DNA, 20 bp, Homo Sapiens
tccaagtatatgggccgcac

SEQ ID NO: 3434 - DNA, 20 bp, Homo Sapiens
ccaagtatatgggccgcaca

SEQ ID NO: 3435 - DNA, 20 bp, Homo Sapiens
caagtatatgggccgcacaa

SEQ ID NO: 3436 - DNA, 20 bp, Homo Sapiens
aagtatatgggccgcacaag

SEQ ID NO: 3437 - DNA, 20 bp, Homo Sapiens
agtatatgggccgcacaagt

SEQ ID NO: 3438 - DNA, 20 bp, Homo Sapiens
gtatatgggccgcacaagtt

SEQ ID NO: 3439 - DNA, 20 bp, Homo Sapiens
tatatgggccgcacaagttt

SEQ ID NO: 3440 - DNA, 20 bp, Homo Sapiens
atatgggccgcacaagtttt

SEQ ID NO: 3441 - DNA, 20 bp, Homo Sapiens
tatgggccgcacaagttttg

SEQ ID NO: 3442 - DNA, 20 bp, Homo Sapiens
atgggccgcacaagttttga

SEQ ID NO: 3443 - DNA, 20 bp, Homo Sapiens
tgggccgcacaagttttgat

SEQ ID NO: 3444 - DNA, 20 bp, Homo Sapiens
gggccgcacaagttttgatt

SEQ ID NO: 3445 - DNA, 20 bp, Homo Sapiens
ggccgcacaagttttgattc

SEQ ID NO: 3446 - DNA, 20 bp, Homo Sapiens
gccgcacaagttttgattcg

SEQ ID NO: 3447 - DNA, 20 bp, Homo Sapiens
ccgcacaagttttgattcgg

SEQ ID NO: 3448 - DNA, 20 bp, Homo Sapiens
cgcacaagttttgattcgga

SEQ ID NO: 3449 - DNA, 20 bp, Homo Sapiens
gcacaagttttgattcggac

SEQ ID NO: 3450 - DNA, 20 bp, Homo Sapiens
cacaagttttgattcggaca

SEQ ID NO: 3451 - DNA, 20 bp, Homo Sapiens
acaagttttgattcggacag

SEQ ID NO: 3452 - DNA, 20 bp, Homo Sapiens
caagttttgattcggacagt

SEQ ID NO: 3453 - DNA, 20 bp, Homo Sapiens
aagttttgattcggacagtt

SEQ ID NO: 3454 - DNA, 20 bp, Homo Sapiens
agttttgattcggacagttg

SEQ ID NO: 3455 - DNA, 20 bp, Homo Sapiens
gttttgattcggacagttgg

SEQ ID NO: 3456 - DNA, 20 bp, Homo Sapiens
ttttgattcggacagttgga

SEQ ID NO: 3457 - DNA, 20 bp, Homo Sapiens
tttgattcggacagttggac

SEQ ID NO: 3458 - DNA, 20 bp, Homo Sapiens
ttgattcggacagttggacc

SEQ ID NO: 3459 - DNA, 20 bp, Homo Sapiens
tgattcggacagttggaccc

SEQ ID NO: 3460 - DNA, 20 bp, Homo Sapiens
gattcggacagttggaccct

SEQ ID NO: 3461 - DNA, 20 bp, Homo Sapiens
attcggacagttggaccctg

SEQ ID NO: 3462 - DNA, 20 bp, Homo Sapiens
ttcggacagttggaccctga

SEQ ID NO: 3463 - DNA, 20 bp, Homo Sapiens
tcggacagttggaccctgag

SEQ ID NO: 3464 - DNA, 20 bp, Homo Sapiens
cggacagttggaccctgaga

SEQ ID NO: 3465 - DNA, 20 bp, Homo Sapiens
ggacagttggaccctgagac

SEQ ID NO: 3466 - DNA, 20 bp, Homo Sapiens
gacagttggaccctgagact

SEQ ID NO: 3467 - DNA, 20 bp, Homo Sapiens
acagttggaccctgagactt

SEQ ID NO: 3468 - DNA, 20 bp, Homo Sapiens
cagttggaccctgagacttc

SEQ ID NO: 3469 - DNA, 20 bp, Homo Sapiens
agttggaccctgagacttca

SEQ ID NO: 3470 - DNA, 20 bp, Homo Sapiens
gttggaccctgagacttcac

SEQ ID NO: 3471 - DNA, 20 bp, Homo Sapiens
ttggaccctgagacttcaca

SEQ ID NO: 3472 - DNA, 20 bp, Homo Sapiens
tggaccctgagacttcacaa

SEQ ID NO: 3473 - DNA, 20 bp, Homo Sapiens
ggaccctgagacttcacaat

SEQ ID NO: 3474 - DNA, 20 bp, Homo Sapiens
gaccctgagacttcacaatc

SEQ ID NO: 3475 - DNA, 20 bp, Homo Sapiens
accctgagacttcacaatct

SEQ ID NO: 3476 - DNA, 20 bp, Homo Sapiens
ccctgagacttcacaatctt

SEQ ID NO: 3477 - DNA, 20 bp, Homo Sapiens
cctgagacttcacaatcttc

SEQ ID NO: 3478 - DNA, 20 bp, Homo Sapiens
ctgagacttcacaatcttca

SEQ ID NO: 3479 - DNA, 20 bp, Homo Sapiens
tgagacttcacaatcttcag

SEQ ID NO: 3480 - DNA, 20 bp, Homo Sapiens
gagacttcacaatcttcaga

SEQ ID NO: 3481 - DNA, 20 bp, Homo Sapiens
agacttcacaatcttcagat

SEQ ID NO: 3482 - DNA, 20 bp, Homo Sapiens
gacttcacaatcttcagatc

SEQ ID NO: 3483 - DNA, 20 bp, Homo Sapiens
acttcacaatcttcagatca

SEQ ID NO: 3484 - DNA, 20 bp, Homo Sapiens
cttcacaatcttcagatcaa

SEQ ID NO: 3485 - DNA, 20 bp, Homo Sapiens
ttcacaatcttcagatcaag

SEQ ID NO: 3486 - DNA, 20 bp, Homo Sapiens
tcacaatcttcagatcaagg

SEQ ID NO: 3487 - DNA, 20 bp, Homo Sapiens
cacaatcttcagatcaagga

SEQ ID NO: 3488 - DNA, 20 bp, Homo Sapiens
acaatcttcagatcaaggac

SEQ ID NO: 3489 - DNA, 20 bp, Homo Sapiens
caatcttcagatcaaggaca

SEQ ID NO: 3490 - DNA, 20 bp, Homo Sapiens
aatcttcagatcaaggacaa

SEQ ID NO: 3491 - DNA, 20 bp, Homo Sapiens
atcttcagatcaaggacaag

SEQ ID NO: 3492 - DNA, 20 bp, Homo Sapiens
tcttcagatcaaggacaagg

SEQ ID NO: 3493 - DNA, 20 bp, Homo Sapiens
cttcagatcaaggacaaggg

SEQ ID NO: 3494 - DNA, 20 bp, Homo Sapiens
ttcagatcaaggacaagggc

SEQ ID NO: 3495 - DNA, 20 bp, Homo Sapiens
tcagatcaaggacaagggct

SEQ ID NO: 3496 - DNA, 20 bp, Homo Sapiens
cagatcaaggacaagggctt

SEQ ID NO: 3497 - DNA, 20 bp, Homo Sapiens
agatcaaggacaagggcttg

SEQ ID NO: 3498 - DNA, 20 bp, Homo Sapiens
gatcaaggacaagggcttgt

SEQ ID NO: 3499 - DNA, 20 bp, Homo Sapiens
atcaaggacaagggcttgta

SEQ ID NO: 3500 - DNA, 20 bp, Homo Sapiens
tcaaggacaagggcttgtat

SEQ ID NO: 3501 - DNA, 20 bp, Homo Sapiens
caaggacaagggcttgtatc

SEQ ID NO: 3502 - DNA, 20 bp, Homo Sapiens
aaggacaagggcttgtatca

SEQ ID NO: 3503 - DNA, 20 bp, Homo Sapiens
aggacaagggcttgtatcaa

SEQ ID NO: 3504 - DNA, 20 bp, Homo Sapiens
ggacaagggcttgtatcaat

SEQ ID NO: 3505 - DNA, 20 bp, Homo Sapiens
gacaagggcttgtatcaatg

SEQ ID NO: 3506 - DNA, 20 bp, Homo Sapiens
acaagggcttgtatcaatgt

SEQ ID NO: 3507 - DNA, 20 bp, Homo Sapiens
caagggcttgtatcaatgta

SEQ ID NO: 3508 - DNA, 20 bp, Homo Sapiens
aagggcttgtatcaatgtat

SEQ ID NO: 3509 - DNA, 20 bp, Homo Sapiens
agggcttgtatcaatgtatc

SEQ ID NO: 3510 - DNA, 20 bp, Homo Sapiens
gggcttgtatcaatgtatca

SEQ ID NO: 3511 - DNA, 20 bp, Homo Sapiens
ggcttgtatcaatgtatcat

SEQ ID NO: 3512 - DNA, 20 bp, Homo Sapiens
gcttgtatcaatgtatcatc

SEQ ID NO: 3513 - DNA, 20 bp, Homo Sapiens
cttgtatcaatgtatcatcc

SEQ ID NO: 3514 - DNA, 20 bp, Homo Sapiens
ttgtatcaatgtatcatcca

SEQ ID NO: 3515 - DNA, 20 bp, Homo Sapiens
tgtatcaatgtatcatccat

SEQ ID NO: 3516 - DNA, 20 bp, Homo Sapiens
gtatcaatgtatcatccatc

SEQ ID NO: 3517 - DNA, 20 bp, Homo Sapiens
tatcaatgtatcatccatca

SEQ ID NO: 3518 - DNA, 20 bp, Homo Sapiens
atcaatgtatcatccatcac

SEQ ID NO: 3519 - DNA, 20 bp, Homo Sapiens
tcaatgtatcatccatcaca

SEQ ID NO: 3520 - DNA, 20 bp, Homo Sapiens
caatgtatcatccatcacaa

SEQ ID NO: 3521 - DNA, 20 bp, Homo Sapiens
aatgtatcatccatcacaaa

SEQ ID NO: 3522 - DNA, 20 bp, Homo Sapiens
atgtatcatccatcacaaaa

SEQ ID NO: 3523 - DNA, 20 bp, Homo Sapiens
tgtatcatccatcacaaaaa

SEQ ID NO: 3524 - DNA, 20 bp, Homo Sapiens
gtatcatccatcacaaaaag

SEQ ID NO: 3525 - DNA, 20 bp, Homo Sapiens
tatcatccatcacaaaaagc

SEQ ID NO: 3526 - DNA, 20 bp, Homo Sapiens
atcatccatcacaaaaagcc

SEQ ID NO: 3527 - DNA, 20 bp, Homo Sapiens
tcatccatcacaaaaagccc

SEQ ID NO: 3528 - DNA, 20 bp, Homo Sapiens
catccatcacaaaaagccca

SEQ ID NO: 3529 - DNA, 20 bp, Homo Sapiens
atccatcacaaaaagcccac

SEQ ID NO: 3530 - DNA, 20 bp, Homo Sapiens
tccatcacaaaaagcccaca

SEQ ID NO: 3531 - DNA, 20 bp, Homo Sapiens
ccatcacaaaaagcccacag

SEQ ID NO: 3532 - DNA, 20 bp, Homo Sapiens
catcacaaaaagcccacagg

SEQ ID NO: 3533 - DNA, 20 bp, Homo Sapiens
atcacaaaaagcccacagga

SEQ ID NO: 3534 - DNA, 20 bp, Homo Sapiens
tcacaaaaagcccacaggaa

SEQ ID NO: 3535 - DNA, 20 bp, Homo Sapiens
cacaaaaagcccacaggaat

SEQ ID NO: 3536 - DNA, 20 bp, Homo Sapiens
acaaaaagcccacaggaatg

SEQ ID NO: 3537 - DNA, 20 bp, Homo Sapiens
caaaaagcccacaggaatga

SEQ ID NO: 3538 - DNA, 20 bp, Homo Sapiens
aaaaagcccacaggaatgat

SEQ ID NO: 3539 - DNA, 20 bp, Homo Sapiens
aaaagcccacaggaatgatt

SEQ ID NO: 3540 - DNA, 20 bp, Homo Sapiens
aaagcccacaggaatgattc

SEQ ID NO: 3541 - DNA, 20 bp, Homo Sapiens
aagcccacaggaatgattcg

SEQ ID NO: 3542 - DNA, 20 bp, Homo Sapiens
agcccacaggaatgattcgc

SEQ ID NO: 3543 - DNA, 20 bp, Homo Sapiens
gcccacaggaatgattcgca

SEQ ID NO: 3544 - DNA, 20 bp, Homo Sapiens
cccacaggaatgattcgcat

SEQ ID NO: 3545 - DNA, 20 bp, Homo Sapiens
ccacaggaatgattcgcatc

SEQ ID NO: 3546 - DNA, 20 bp, Homo Sapiens
cacaggaatgattcgcatcc

SEQ ID NO: 3547 - DNA, 20 bp, Homo Sapiens
acaggaatgattcgcatcca

SEQ ID NO: 3548 - DNA, 20 bp, Homo Sapiens
caggaatgattcgcatccac

SEQ ID NO: 3549 - DNA, 20 bp, Homo Sapiens
aggaatgattcgcatccacc

SEQ ID NO: 3550 - DNA, 20 bp, Homo Sapiens
ggaatgattcgcatccacca

SEQ ID NO: 3551 - DNA, 20 bp, Homo Sapiens
gaatgattcgcatccaccag

SEQ ID NO: 3552 - DNA, 20 bp, Homo Sapiens
aatgattcgcatccaccaga

SEQ ID NO: 3553 - DNA, 20 bp, Homo Sapiens
atgattcgcatccaccagat

SEQ ID NO: 3554 - DNA, 20 bp, Homo Sapiens
tgattcgcatccaccagatg

SEQ ID NO: 3555 - DNA, 20 bp, Homo Sapiens
gattcgcatccaccagatga

SEQ ID NO: 3556 - DNA, 20 bp, Homo Sapiens
attcgcatccaccagatgaa

SEQ ID NO: 3557 - DNA, 20 bp, Homo Sapiens
ttcgcatccaccagatgaat

SEQ ID NO: 3558 - DNA, 20 bp, Homo Sapiens
tcgcatccaccagatgaatt

SEQ ID NO: 3559 - DNA, 20 bp, Homo Sapiens
cgcatccaccagatgaattc

SEQ ID NO: 3560 - DNA, 20 bp, Homo Sapiens
gcatccaccagatgaattct

SEQ ID NO: 3561 - DNA, 20 bp, Homo Sapiens
catccaccagatgaattctg

SEQ ID NO: 3562 - DNA, 20 bp, Homo Sapiens
atccaccagatgaattctga

SEQ ID NO: 3563 - DNA, 20 bp, Homo Sapiens
tccaccagatgaattctgaa

SEQ ID NO: 3564 - DNA, 20 bp, Homo Sapiens
ccaccagatgaattctgaac

SEQ ID NO: 3565 - DNA, 20 bp, Homo Sapiens
caccagatgaattctgaact

SEQ ID NO: 3566 - DNA, 20 bp, Homo Sapiens
accagatgaattctgaactg

SEQ ID NO: 3567 - DNA, 20 bp, Homo Sapiens
ccagatgaattctgaactgt

SEQ ID NO: 3568 - DNA, 20 bp, Homo Sapiens
cagatgaattctgaactgtc

SEQ ID NO: 3569 - DNA, 20 bp, Homo Sapiens
agatgaattctgaactgtca

SEQ ID NO: 3570 - DNA, 20 bp, Homo Sapiens
gatgaattctgaactgtcag

SEQ ID NO: 3571 - DNA, 20 bp, Homo Sapiens
atgaattctgaactgtcagt

SEQ ID NO: 3572 - DNA, 20 bp, Homo Sapiens
tgaattctgaactgtcagtg

SEQ ID NO: 3573 - DNA, 20 bp, Homo Sapiens
gaattctgaactgtcagtgc

SEQ ID NO: 3574 - DNA, 20 bp, Homo Sapiens
aattctgaactgtcagtgct

SEQ ID NO: 3575 - DNA, 20 bp, Homo Sapiens
attctgaactgtcagtgctt

SEQ ID NO: 3576 - DNA, 20 bp, Homo Sapiens
ttctgaactgtcagtgcttg

SEQ ID NO: 3577 - DNA, 20 bp, Homo Sapiens
tctgaactgtcagtgcttgc

SEQ ID NO: 3578 - DNA, 20 bp, Homo Sapiens
ctgaactgtcagtgcttgct

SEQ ID NO: 3579 - DNA, 20 bp, Homo Sapiens
tgaactgtcagtgcttgcta

SEQ ID NO: 3580 - DNA, 20 bp, Homo Sapiens
gaactgtcagtgcttgctaa

SEQ ID NO: 3581 - DNA, 20 bp, Homo Sapiens
aactgtcagtgcttgctaac

SEQ ID NO: 3582 - DNA, 20 bp, Homo Sapiens
actgtcagtgcttgctaact

SEQ ID NO: 3583 - DNA, 20 bp, Homo Sapiens
ctgtcagtgcttgctaactt

SEQ ID NO: 3584 - DNA, 20 bp, Homo Sapiens
tgtcagtgcttgctaacttc

SEQ ID NO: 3585 - DNA, 20 bp, Homo Sapiens
gtcagtgcttgctaacttca

SEQ ID NO: 3586 - DNA, 20 bp, Homo Sapiens
tcagtgcttgctaacttcag

SEQ ID NO: 3587 - DNA, 20 bp, Homo Sapiens
cagtgcttgctaacttcagt

SEQ ID NO: 3588 - DNA, 20 bp, Homo Sapiens
agtgcttgctaacttcagtc

SEQ ID NO: 3589 - DNA, 20 bp, Homo Sapiens
gtgcttgctaacttcagtca

SEQ ID NO: 3590 - DNA, 20 bp, Homo Sapiens
tgcttgctaacttcagtcaa

SEQ ID NO: 3591 - DNA, 20 bp, Homo Sapiens
gcttgctaacttcagtcaac

SEQ ID NO: 3592 - DNA, 20 bp, Homo Sapiens
cttgctaacttcagtcaacc

SEQ ID NO: 3593 - DNA, 20 bp, Homo Sapiens
ttgctaacttcagtcaacct

SEQ ID NO: 3594 - DNA, 20 bp, Homo Sapiens
tgctaacttcagtcaacctg

SEQ ID NO: 3595 - DNA, 20 bp, Homo Sapiens
gctaacttcagtcaacctga

SEQ ID NO: 3596 - DNA, 20 bp, Homo Sapiens
ctaacttcagtcaacctgaa

SEQ ID NO: 3597 - DNA, 20 bp, Homo Sapiens
taacttcagtcaacctgaaa

SEQ ID NO: 3598 - DNA, 20 bp, Homo Sapiens
aacttcagtcaacctgaaat

SEQ ID NO: 3599 - DNA, 20 bp, Homo Sapiens
acttcagtcaacctgaaata

SEQ ID NO: 3600 - DNA, 20 bp, Homo Sapiens
cttcagtcaacctgaaatag

SEQ ID NO: 3601 - DNA, 20 bp, Homo Sapiens
ttcagtcaacctgaaatagt

SEQ ID NO: 3602 - DNA, 20 bp, Homo Sapiens
tcagtcaacctgaaatagta

SEQ ID NO: 3603 - DNA, 20 bp, Homo Sapiens
cagtcaacctgaaatagtac

SEQ ID NO: 3604 - DNA, 20 bp, Homo Sapiens
agtcaacctgaaatagtacc

SEQ ID NO: 3605 - DNA, 20 bp, Homo Sapiens
gtcaacctgaaatagtacca

SEQ ID NO: 3606 - DNA, 20 bp, Homo Sapiens
tcaacctgaaatagtaccaa

SEQ ID NO: 3607 - DNA, 20 bp, Homo Sapiens
caacctgaaatagtaccaat

SEQ ID NO: 3608 - DNA, 20 bp, Homo Sapiens
aacctgaaatagtaccaatt

SEQ ID NO: 3609 - DNA, 20 bp, Homo Sapiens
acctgaaatagtaccaattt

SEQ ID NO: 3610 - DNA, 20 bp, Homo Sapiens
cctgaaatagtaccaatttc

SEQ ID NO: 3611 - DNA, 20 bp, Homo Sapiens
ctgaaatagtaccaatttct

SEQ ID NO: 3612 - DNA, 20 bp, Homo Sapiens
tgaaatagtaccaatttcta

SEQ ID NO: 3613 - DNA, 20 bp, Homo Sapiens
gaaatagtaccaatttctaa

SEQ ID NO: 3614 - DNA, 20 bp, Homo Sapiens
aaatagtaccaatttctaat

SEQ ID NO: 3615 - DNA, 20 bp, Homo Sapiens
aatagtaccaatttctaata

SEQ ID NO: 3616 - DNA, 20 bp, Homo Sapiens
atagtaccaatttctaatat

SEQ ID NO: 3617 - DNA, 20 bp, Homo Sapiens
tagtaccaatttctaatata

SEQ ID NO: 3618 - DNA, 20 bp, Homo Sapiens
agtaccaatttctaatataa

SEQ ID NO: 3619 - DNA, 20 bp, Homo Sapiens
gtaccaatttctaatataac

SEQ ID NO: 3620 - DNA, 20 bp, Homo Sapiens
taccaatttctaatataaca

SEQ ID NO: 3621 - DNA, 20 bp, Homo Sapiens
accaatttctaatataacag

SEQ ID NO: 3622 - DNA, 20 bp, Homo Sapiens
ccaatttctaatataacaga

SEQ ID NO: 3623 - DNA, 20 bp, Homo Sapiens
caatttctaatataacagaa

SEQ ID NO: 3624 - DNA, 20 bp, Homo Sapiens
aatttctaatataacagaaa

SEQ ID NO: 3625 - DNA, 20 bp, Homo Sapiens
atttctaatataacagaaaa

SEQ ID NO: 3626 - DNA, 20 bp, Homo Sapiens
tttctaatataacagaaaat

SEQ ID NO: 3627 - DNA, 20 bp, Homo Sapiens
ttctaatataacagaaaatg

SEQ ID NO: 3628 - DNA, 20 bp, Homo Sapiens
tctaatataacagaaaatgt

SEQ ID NO: 3629 - DNA, 20 bp, Homo Sapiens
ctaatataacagaaaatgtg

SEQ ID NO: 3630 - DNA, 20 bp, Homo Sapiens
taatataacagaaaatgtgt

SEQ ID NO: 3631 - DNA, 20 bp, Homo Sapiens
aatataacagaaaatgtgta

SEQ ID NO: 3632 - DNA, 20 bp, Homo Sapiens
atataacagaaaatgtgtac

SEQ ID NO: 3633 - DNA, 20 bp, Homo Sapiens
tataacagaaaatgtgtaca

SEQ ID NO: 3634 - DNA, 20 bp, Homo Sapiens
ataacagaaaatgtgtacat

SEQ ID NO: 3635 - DNA, 20 bp, Homo Sapiens
taacagaaaatgtgtacata

SEQ ID NO: 3636 - DNA, 20 bp, Homo Sapiens
aacagaaaatgtgtacataa

SEQ ID NO: 3637 - DNA, 20 bp, Homo Sapiens
acagaaaatgtgtacataaa

SEQ ID NO: 3638 - DNA, 20 bp, Homo Sapiens
cagaaaatgtgtacataaat

SEQ ID NO: 3639 - DNA, 20 bp, Homo Sapiens
agaaaatgtgtacataaatt

SEQ ID NO: 3640 - DNA, 20 bp, Homo Sapiens
gaaaatgtgtacataaattt

SEQ ID NO: 3641 - DNA, 20 bp, Homo Sapiens
aaaatgtgtacataaatttg

SEQ ID NO: 3642 - DNA, 20 bp, Homo Sapiens
aaatgtgtacataaatttga

SEQ ID NO: 3643 - DNA, 20 bp, Homo Sapiens
aatgtgtacataaatttgac

SEQ ID NO: 3644 - DNA, 20 bp, Homo Sapiens
atgtgtacataaatttgacc

SEQ ID NO: 3645 - DNA, 20 bp, Homo Sapiens
tgtgtacataaatttgacct

SEQ ID NO: 3646 - DNA, 20 bp, Homo Sapiens
gtgtacataaatttgacctg

SEQ ID NO: 3647 - DNA, 20 bp, Homo Sapiens
tgtacataaatttgacctgc

SEQ ID NO: 3648 - DNA, 20 bp, Homo Sapiens
gtacataaatttgacctgct

SEQ ID NO: 3649 - DNA, 20 bp, Homo Sapiens
tacataaatttgacctgctc

SEQ ID NO: 3650 - DNA, 20 bp, Homo Sapiens
acataaatttgacctgctca

SEQ ID NO: 3651 - DNA, 20 bp, Homo Sapiens
cataaatttgacctgctcat

SEQ ID NO: 3652 - DNA, 20 bp, Homo Sapiens
ataaatttgacctgctcatc

SEQ ID NO: 3653 - DNA, 20 bp, Homo Sapiens
taaatttgacctgctcatct

SEQ ID NO: 3654 - DNA, 20 bp, Homo Sapiens
aaatttgacctgctcatcta

SEQ ID NO: 3655 - DNA, 20 bp, Homo Sapiens
aatttgacctgctcatctat

SEQ ID NO: 3656 - DNA, 20 bp, Homo Sapiens
atttgacctgctcatctata

SEQ ID NO: 3657 - DNA, 20 bp, Homo Sapiens
tttgacctgctcatctatac

SEQ ID NO: 3658 - DNA, 20 bp, Homo Sapiens
ttgacctgctcatctataca

SEQ ID NO: 3659 - DNA, 20 bp, Homo Sapiens
tgacctgctcatctatacac

SEQ ID NO: 3660 - DNA, 20 bp, Homo Sapiens
gacctgctcatctatacacg

SEQ ID NO: 3661 - DNA, 20 bp, Homo Sapiens
acctgctcatctatacacgg

SEQ ID NO: 3662 - DNA, 20 bp, Homo Sapiens
cctgctcatctatacacggt

SEQ ID NO: 3663 - DNA, 20 bp, Homo Sapiens
ctgctcatctatacacggtt

SEQ ID NO: 3664 - DNA, 20 bp, Homo Sapiens
tgctcatctatacacggtta

SEQ ID NO: 3665 - DNA, 20 bp, Homo Sapiens
gctcatctatacacggttac

SEQ ID NO: 3666 - DNA, 20 bp, Homo Sapiens
ctcatctatacacggttacc

SEQ ID NO: 3667 - DNA, 20 bp, Homo Sapiens
tcatctatacacggttaccc

SEQ ID NO: 3668 - DNA, 20 bp, Homo Sapiens
catctatacacggttaccca

SEQ ID NO: 3669 - DNA, 20 bp, Homo Sapiens
atctatacacggttacccag

SEQ ID NO: 3670 - DNA, 20 bp, Homo Sapiens
tctatacacggttacccaga

SEQ ID NO: 3671 - DNA, 20 bp, Homo Sapiens
ctatacacggttacccagaa

SEQ ID NO: 3672 - DNA, 20 bp, Homo Sapiens
tatacacggttacccagaac

SEQ ID NO: 3673 - DNA, 20 bp, Homo Sapiens
atacacggttacccagaacc

SEQ ID NO: 3674 - DNA, 20 bp, Homo Sapiens
tacacggttacccagaacct

SEQ ID NO: 3675 - DNA, 20 bp, Homo Sapiens
acacggttacccagaaccta

SEQ ID NO: 3676 - DNA, 20 bp, Homo Sapiens
cacggttacccagaacctaa

SEQ ID NO: 3677 - DNA, 20 bp, Homo Sapiens
acggttacccagaacctaag

SEQ ID NO: 3678 - DNA, 20 bp, Homo Sapiens
cggttacccagaacctaaga

SEQ ID NO: 3679 - DNA, 20 bp, Homo Sapiens
ggttacccagaacctaagaa

SEQ ID NO: 3680 - DNA, 20 bp, Homo Sapiens
gttacccagaacctaagaag

SEQ ID NO: 3681 - DNA, 20 bp, Homo Sapiens
ttacccagaacctaagaaga

SEQ ID NO: 3682 - DNA, 20 bp, Homo Sapiens
tacccagaacctaagaagat

SEQ ID NO: 3683 - DNA, 20 bp, Homo Sapiens
acccagaacctaagaagatg

SEQ ID NO: 3684 - DNA, 20 bp, Homo Sapiens
cccagaacctaagaagatga

SEQ ID NO: 3685 - DNA, 20 bp, Homo Sapiens
ccagaacctaagaagatgag

SEQ ID NO: 3686 - DNA, 20 bp, Homo Sapiens
cagaacctaagaagatgagt

SEQ ID NO: 3687 - DNA, 20 bp, Homo Sapiens
agaacctaagaagatgagtg

SEQ ID NO: 3688 - DNA, 20 bp, Homo Sapiens
gaacctaagaagatgagtgt

SEQ ID NO: 3689 - DNA, 20 bp, Homo Sapiens
aacctaagaagatgagtgtt

SEQ ID NO: 3690 - DNA, 20 bp, Homo Sapiens
acctaagaagatgagtgttt

SEQ ID NO: 3691 - DNA, 20 bp, Homo Sapiens
cctaagaagatgagtgtttt

SEQ ID NO: 3692 - DNA, 20 bp, Homo Sapiens
ctaagaagatgagtgttttg

SEQ ID NO: 3693 - DNA, 20 bp, Homo Sapiens
taagaagatgagtgttttgc

SEQ ID NO: 3694 - DNA, 20 bp, Homo Sapiens
aagaagatgagtgttttgct

SEQ ID NO: 3695 - DNA, 20 bp, Homo Sapiens
agaagatgagtgttttgcta

SEQ ID NO: 3696 - DNA, 20 bp, Homo Sapiens
gaagatgagtgttttgctaa

SEQ ID NO: 3697 - DNA, 20 bp, Homo Sapiens
aagatgagtgttttgctaag

SEQ ID NO: 3698 - DNA, 20 bp, Homo Sapiens
agatgagtgttttgctaaga

SEQ ID NO: 3699 - DNA, 20 bp, Homo Sapiens
gatgagtgttttgctaagaa

SEQ ID NO: 3700 - DNA, 20 bp, Homo Sapiens
atgagtgttttgctaagaac

SEQ ID NO: 3701 - DNA, 20 bp, Homo Sapiens
tgagtgttttgctaagaacc

SEQ ID NO: 3702 - DNA, 20 bp, Homo Sapiens
gagtgttttgctaagaacca

SEQ ID NO: 3703 - DNA, 20 bp, Homo Sapiens
agtgttttgctaagaaccaa

SEQ ID NO: 3704 - DNA, 20 bp, Homo Sapiens
gtgttttgctaagaaccaag

SEQ ID NO: 3705 - DNA, 20 bp, Homo Sapiens
tgttttgctaagaaccaaga

SEQ ID NO: 3706 - DNA, 20 bp, Homo Sapiens
gttttgctaagaaccaagaa

SEQ ID NO: 3707 - DNA, 20 bp, Homo Sapiens
ttttgctaagaaccaagaat

SEQ ID NO: 3708 - DNA, 20 bp, Homo Sapiens
tttgctaagaaccaagaatt

SEQ ID NO: 3709 - DNA, 20 bp, Homo Sapiens
ttgctaagaaccaagaattc

SEQ ID NO: 3710 - DNA, 20 bp, Homo Sapiens
tgctaagaaccaagaattca

SEQ ID NO: 3711 - DNA, 20 bp, Homo Sapiens
gctaagaaccaagaattcaa

SEQ ID NO: 3712 - DNA, 20 bp, Homo Sapiens
ctaagaaccaagaattcaac

SEQ ID NO: 3713 - DNA, 20 bp, Homo Sapiens
taagaaccaagaattcaact

SEQ ID NO: 3714 - DNA, 20 bp, Homo Sapiens
aagaaccaagaattcaacta

SEQ ID NO: 3715 - DNA, 20 bp, Homo Sapiens
agaaccaagaattcaactat

SEQ ID NO: 3716 - DNA, 20 bp, Homo Sapiens
gaaccaagaattcaactatc

SEQ ID NO: 3717 - DNA, 20 bp, Homo Sapiens
aaccaagaattcaactatcg

SEQ ID NO: 3718 - DNA, 20 bp, Homo Sapiens
accaagaattcaactatcga

SEQ ID NO: 3719 - DNA, 20 bp, Homo Sapiens
ccaagaattcaactatcgag

SEQ ID NO: 3720 - DNA, 20 bp, Homo Sapiens
caagaattcaactatcgagt

SEQ ID NO: 3721 - DNA, 20 bp, Homo Sapiens
aagaattcaactatcgagta

SEQ ID NO: 3722 - DNA, 20 bp, Homo Sapiens
agaattcaactatcgagtat

SEQ ID NO: 3723 - DNA, 20 bp, Homo Sapiens
gaattcaactatcgagtatg

SEQ ID NO: 3724 - DNA, 20 bp, Homo Sapiens
aattcaactatcgagtatga

SEQ ID NO: 3725 - DNA, 20 bp, Homo Sapiens
attcaactatcgagtatgat

SEQ ID NO: 3726 - DNA, 20 bp, Homo Sapiens
ttcaactatcgagtatgatg

SEQ ID NO: 3727 - DNA, 20 bp, Homo Sapiens
tcaactatcgagtatgatgg

SEQ ID NO: 3728 - DNA, 20 bp, Homo Sapiens
caactatcgagtatgatggt

SEQ ID NO: 3729 - DNA, 20 bp, Homo Sapiens
aactatcgagtatgatggta

SEQ ID NO: 3730 - DNA, 20 bp, Homo Sapiens
actatcgagtatgatggtat

SEQ ID NO: 3731 - DNA, 20 bp, Homo Sapiens
ctatcgagtatgatggtatt

SEQ ID NO: 3732 - DNA, 20 bp, Homo Sapiens
tatcgagtatgatggtatta

SEQ ID NO: 3733 - DNA, 20 bp, Homo Sapiens
atcgagtatgatggtattat

SEQ ID NO: 3734 - DNA, 20 bp, Homo Sapiens
tcgagtatgatggtattatg

SEQ ID NO: 3735 - DNA, 20 bp, Homo Sapiens
cgagtatgatggtattatgc

SEQ ID NO: 3736 - DNA, 20 bp, Homo Sapiens
gagtatgatggtattatgca

SEQ ID NO: 3737 - DNA, 20 bp, Homo Sapiens
agtatgatggtattatgcag

SEQ ID NO: 3738 - DNA, 20 bp, Homo Sapiens
gtatgatggtattatgcaga

SEQ ID NO: 3739 - DNA, 20 bp, Homo Sapiens
tatgatggtattatgcagaa

SEQ ID NO: 3740 - DNA, 20 bp, Homo Sapiens
atgatggtattatgcagaaa

SEQ ID NO: 3741 - DNA, 20 bp, Homo Sapiens
tgatggtattatgcagaaat

SEQ ID NO: 3742 - DNA, 20 bp, Homo Sapiens
gatggtattatgcagaaatc

SEQ ID NO: 3743 - DNA, 20 bp, Homo Sapiens
atggtattatgcagaaatct

SEQ ID NO: 3744 - DNA, 20 bp, Homo Sapiens
tggtattatgcagaaatctc

SEQ ID NO: 3745 - DNA, 20 bp, Homo Sapiens
ggtattatgcagaaatctca

SEQ ID NO: 3746 - DNA, 20 bp, Homo Sapiens
gtattatgcagaaatctcaa

SEQ ID NO: 3747 - DNA, 20 bp, Homo Sapiens
tattatgcagaaatctcaag

SEQ ID NO: 3748 - DNA, 20 bp, Homo Sapiens
attatgcagaaatctcaaga

SEQ ID NO: 3749 - DNA, 20 bp, Homo Sapiens
ttatgcagaaatctcaagat

SEQ ID NO: 3750 - DNA, 20 bp, Homo Sapiens
tatgcagaaatctcaagata

SEQ ID NO: 3751 - DNA, 20 bp, Homo Sapiens
atgcagaaatctcaagataa

SEQ ID NO: 3752 - DNA, 20 bp, Homo Sapiens
tgcagaaatctcaagataat

SEQ ID NO: 3753 - DNA, 20 bp, Homo Sapiens
gcagaaatctcaagataatg

SEQ ID NO: 3754 - DNA, 20 bp, Homo Sapiens
cagaaatctcaagataatgt

SEQ ID NO: 3755 - DNA, 20 bp, Homo Sapiens
agaaatctcaagataatgtc

SEQ ID NO: 3756 - DNA, 20 bp, Homo Sapiens
gaaatctcaagataatgtca

SEQ ID NO: 3757 - DNA, 20 bp, Homo Sapiens
aaatctcaagataatgtcac

SEQ ID NO: 3758 - DNA, 20 bp, Homo Sapiens
aatctcaagataatgtcaca

SEQ ID NO: 3759 - DNA, 20 bp, Homo Sapiens
atctcaagataatgtcacag

SEQ ID NO: 3760 - DNA, 20 bp, Homo Sapiens
tctcaagataatgtcacaga

SEQ ID NO: 3761 - DNA, 20 bp, Homo Sapiens
ctcaagataatgtcacagaa

SEQ ID NO: 3762 - DNA, 20 bp, Homo Sapiens
tcaagataatgtcacagaac

SEQ ID NO: 3763 - DNA, 20 bp, Homo Sapiens
caagataatgtcacagaact

SEQ ID NO: 3764 - DNA, 20 bp, Homo Sapiens
aagataatgtcacagaactg

SEQ ID NO: 3765 - DNA, 20 bp, Homo Sapiens
agataatgtcacagaactgt

SEQ ID NO: 3766 - DNA, 20 bp, Homo Sapiens
gataatgtcacagaactgta

SEQ ID NO: 3767 - DNA, 20 bp, Homo Sapiens
ataatgtcacagaactgtac

SEQ ID NO: 3768 - DNA, 20 bp, Homo Sapiens
taatgtcacagaactgtacg

SEQ ID NO: 3769 - DNA, 20 bp, Homo Sapiens
aatgtcacagaactgtacga

SEQ ID NO: 3770 - DNA, 20 bp, Homo Sapiens
atgtcacagaactgtacgac

SEQ ID NO: 3771 - DNA, 20 bp, Homo Sapiens
tgtcacagaactgtacgacg

SEQ ID NO: 3772 - DNA, 20 bp, Homo Sapiens
gtcacagaactgtacgacgt

SEQ ID NO: 3773 - DNA, 20 bp, Homo Sapiens
tcacagaactgtacgacgtt

SEQ ID NO: 3774 - DNA, 20 bp, Homo Sapiens
cacagaactgtacgacgttt

SEQ ID NO: 3775 - DNA, 20 bp, Homo Sapiens
acagaactgtacgacgtttc

SEQ ID NO: 3776 - DNA, 20 bp, Homo Sapiens
cagaactgtacgacgtttcc

SEQ ID NO: 3777 - DNA, 20 bp, Homo Sapiens
agaactgtacgacgtttcca

SEQ ID NO: 3778 - DNA, 20 bp, Homo Sapiens
gaactgtacgacgtttccat

SEQ ID NO: 3779 - DNA, 20 bp, Homo Sapiens
aactgtacgacgtttccatc

SEQ ID NO: 3780 - DNA, 20 bp, Homo Sapiens
actgtacgacgtttccatca

SEQ ID NO: 3781 - DNA, 20 bp, Homo Sapiens
ctgtacgacgtttccatcag

SEQ ID NO: 3782 - DNA, 20 bp, Homo Sapiens
tgtacgacgtttccatcagc

SEQ ID NO: 3783 - DNA, 20 bp, Homo Sapiens
gtacgacgtttccatcagct

SEQ ID NO: 3784 - DNA, 20 bp, Homo Sapiens
tacgacgtttccatcagctt

SEQ ID NO: 3785 - DNA, 20 bp, Homo Sapiens
acgacgtttccatcagcttg

SEQ ID NO: 3786 - DNA, 20 bp, Homo Sapiens
cgacgtttccatcagcttgt

SEQ ID NO: 3787 - DNA, 20 bp, Homo Sapiens
gacgtttccatcagcttgtc

SEQ ID NO: 3788 - DNA, 20 bp, Homo Sapiens
acgtttccatcagcttgtct

SEQ ID NO: 3789 - DNA, 20 bp, Homo Sapiens
cgtttccatcagcttgtctg

SEQ ID NO: 3790 - DNA, 20 bp, Homo Sapiens
gtttccatcagcttgtctgt

SEQ ID NO: 3791 - DNA, 20 bp, Homo Sapiens
tttccatcagcttgtctgtt

SEQ ID NO: 3792 - DNA, 20 bp, Homo Sapiens
ttccatcagcttgtctgttt

SEQ ID NO: 3793 - DNA, 20 bp, Homo Sapiens
tccatcagcttgtctgtttc

SEQ ID NO: 3794 - DNA, 20 bp, Homo Sapiens
ccatcagcttgtctgtttca

SEQ ID NO: 3795 - DNA, 20 bp, Homo Sapiens
catcagcttgtctgtttcat

SEQ ID NO: 3796 - DNA, 20 bp, Homo Sapiens
atcagcttgtctgtttcatt

SEQ ID NO: 3797 - DNA, 20 bp, Homo Sapiens
tcagcttgtctgtttcattc

SEQ ID NO: 3798 - DNA, 20 bp, Homo Sapiens
cagcttgtctgtttcattcc

SEQ ID NO: 3799 - DNA, 20 bp, Homo Sapiens
agcttgtctgtttcattccc

SEQ ID NO: 3800 - DNA, 20 bp, Homo Sapiens
gcttgtctgtttcattccct

SEQ ID NO: 3801 - DNA, 20 bp, Homo Sapiens
cttgtctgtttcattccctg

SEQ ID NO: 3802 - DNA, 20 bp, Homo Sapiens
ttgtctgtttcattccctga

SEQ ID NO: 3803 - DNA, 20 bp, Homo Sapiens
tgtctgtttcattccctgat

SEQ ID NO: 3804 - DNA, 20 bp, Homo Sapiens
gtctgtttcattccctgatg

SEQ ID NO: 3805 - DNA, 20 bp, Homo Sapiens
tctgtttcattccctgatgt

SEQ ID NO: 3806 - DNA, 20 bp, Homo Sapiens
ctgtttcattccctgatgtt

SEQ ID NO: 3807 - DNA, 20 bp, Homo Sapiens
tgtttcattccctgatgtta

SEQ ID NO: 3808 - DNA, 20 bp, Homo Sapiens
gtttcattccctgatgttac

SEQ ID NO: 3809 - DNA, 20 bp, Homo Sapiens
tttcattccctgatgttacg

SEQ ID NO: 3810 - DNA, 20 bp, Homo Sapiens
ttcattccctgatgttacga

SEQ ID NO: 3811 - DNA, 20 bp, Homo Sapiens
tcattccctgatgttacgag

SEQ ID NO: 3812 - DNA, 20 bp, Homo Sapiens
cattccctgatgttacgagc

SEQ ID NO: 3813 - DNA, 20 bp, Homo Sapiens
attccctgatgttacgagca

SEQ ID NO: 3814 - DNA, 20 bp, Homo Sapiens
ttccctgatgttacgagcaa

SEQ ID NO: 3815 - DNA, 20 bp, Homo Sapiens
tccctgatgttacgagcaat

SEQ ID NO: 3816 - DNA, 20 bp, Homo Sapiens
ccctgatgttacgagcaata

SEQ ID NO: 3817 - DNA, 20 bp, Homo Sapiens
cctgatgttacgagcaatat

SEQ ID NO: 3818 - DNA, 20 bp, Homo Sapiens
ctgatgttacgagcaatatg

SEQ ID NO: 3819 - DNA, 20 bp, Homo Sapiens
tgatgttacgagcaatatga

SEQ ID NO: 3820 - DNA, 20 bp, Homo Sapiens
gatgttacgagcaatatgac

SEQ ID NO: 3821 - DNA, 20 bp, Homo Sapiens
atgttacgagcaatatgacc

SEQ ID NO: 3822 - DNA, 20 bp, Homo Sapiens
tgttacgagcaatatgacca

SEQ ID NO: 3823 - DNA, 20 bp, Homo Sapiens
gttacgagcaatatgaccat

SEQ ID NO: 3824 - DNA, 20 bp, Homo Sapiens
ttacgagcaatatgaccatc

SEQ ID NO: 3825 - DNA, 20 bp, Homo Sapiens
tacgagcaatatgaccatct

SEQ ID NO: 3826 - DNA, 20 bp, Homo Sapiens
acgagcaatatgaccatctt

SEQ ID NO: 3827 - DNA, 20 bp, Homo Sapiens
cgagcaatatgaccatcttc

SEQ ID NO: 3828 - DNA, 20 bp, Homo Sapiens
gagcaatatgaccatcttct

SEQ ID NO: 3829 - DNA, 20 bp, Homo Sapiens
agcaatatgaccatcttctg

SEQ ID NO: 3830 - DNA, 20 bp, Homo Sapiens
gcaatatgaccatcttctgt

SEQ ID NO: 3831 - DNA, 20 bp, Homo Sapiens
caatatgaccatcttctgta

SEQ ID NO: 3832 - DNA, 20 bp, Homo Sapiens
aatatgaccatcttctgtat

SEQ ID NO: 3833 - DNA, 20 bp, Homo Sapiens
atatgaccatcttctgtatt

SEQ ID NO: 3834 - DNA, 20 bp, Homo Sapiens
tatgaccatcttctgtattc

SEQ ID NO: 3835 - DNA, 20 bp, Homo Sapiens
atgaccatcttctgtattct

SEQ ID NO: 3836 - DNA, 20 bp, Homo Sapiens
tgaccatcttctgtattctg

SEQ ID NO: 3837 - DNA, 20 bp, Homo Sapiens
gaccatcttctgtattctgg

SEQ ID NO: 3838 - DNA, 20 bp, Homo Sapiens
accatcttctgtattctgga

SEQ ID NO: 3839 - DNA, 20 bp, Homo Sapiens
ccatcttctgtattctggaa

SEQ ID NO: 3840 - DNA, 20 bp, Homo Sapiens
catcttctgtattctggaaa

SEQ ID NO: 3841 - DNA, 20 bp, Homo Sapiens
atcttctgtattctggaaac

SEQ ID NO: 3842 - DNA, 20 bp, Homo Sapiens
tcttctgtattctggaaact

SEQ ID NO: 3843 - DNA, 20 bp, Homo Sapiens
cttctgtattctggaaactg

SEQ ID NO: 3844 - DNA, 20 bp, Homo Sapiens
ttctgtattctggaaactga

SEQ ID NO: 3845 - DNA, 20 bp, Homo Sapiens
tctgtattctggaaactgac

SEQ ID NO: 3846 - DNA, 20 bp, Homo Sapiens
ctgtattctggaaactgaca

SEQ ID NO: 3847 - DNA, 20 bp, Homo Sapiens
tgtattctggaaactgacaa

SEQ ID NO: 3848 - DNA, 20 bp, Homo Sapiens
gtattctggaaactgacaag

SEQ ID NO: 3849 - DNA, 20 bp, Homo Sapiens
tattctggaaactgacaaga

SEQ ID NO: 3850 - DNA, 20 bp, Homo Sapiens
attctggaaactgacaagac

SEQ ID NO: 3851 - DNA, 20 bp, Homo Sapiens
ttctggaaactgacaagacg

SEQ ID NO: 3852 - DNA, 20 bp, Homo Sapiens
tctggaaactgacaagacgc

SEQ ID NO: 3853 - DNA, 20 bp, Homo Sapiens
ctggaaactgacaagacgcg

SEQ ID NO: 3854 - DNA, 20 bp, Homo Sapiens
tggaaactgacaagacgcgg

SEQ ID NO: 3855 - DNA, 20 bp, Homo Sapiens
ggaaactgacaagacgcggc

SEQ ID NO: 3856 - DNA, 20 bp, Homo Sapiens
gaaactgacaagacgcggct

SEQ ID NO: 3857 - DNA, 20 bp, Homo Sapiens
aaactgacaagacgcggctt

SEQ ID NO: 3858 - DNA, 20 bp, Homo Sapiens
aactgacaagacgcggcttt

SEQ ID NO: 3859 - DNA, 20 bp, Homo Sapiens
actgacaagacgcggctttt

SEQ ID NO: 3860 - DNA, 20 bp, Homo Sapiens
ctgacaagacgcggctttta

SEQ ID NO: 3861 - DNA, 20 bp, Homo Sapiens
tgacaagacgcggcttttat

SEQ ID NO: 3862 - DNA, 20 bp, Homo Sapiens
gacaagacgcggcttttatc

SEQ ID NO: 3863 - DNA, 20 bp, Homo Sapiens
acaagacgcggcttttatct

SEQ ID NO: 3864 - DNA, 20 bp, Homo Sapiens
caagacgcggcttttatctt

SEQ ID NO: 3865 - DNA, 20 bp, Homo Sapiens
aagacgcggcttttatcttc

SEQ ID NO: 3866 - DNA, 20 bp, Homo Sapiens
agacgcggcttttatcttca

SEQ ID NO: 3867 - DNA, 20 bp, Homo Sapiens
gacgcggcttttatcttcac

SEQ ID NO: 3868 - DNA, 20 bp, Homo Sapiens
acgcggcttttatcttcacc

SEQ ID NO: 3869 - DNA, 20 bp, Homo Sapiens
cgcggcttttatcttcacct

SEQ ID NO: 3870 - DNA, 20 bp, Homo Sapiens
gcggcttttatcttcacctt

SEQ ID NO: 3871 - DNA, 20 bp, Homo Sapiens
cggcttttatcttcaccttt

SEQ ID NO: 3872 - DNA, 20 bp, Homo Sapiens
ggcttttatcttcacctttc

SEQ ID NO: 3873 - DNA, 20 bp, Homo Sapiens
gcttttatcttcacctttct

SEQ ID NO: 3874 - DNA, 20 bp, Homo Sapiens
cttttatcttcacctttctc

SEQ ID NO: 3875 - DNA, 20 bp, Homo Sapiens
ttttatcttcacctttctct

SEQ ID NO: 3876 - DNA, 20 bp, Homo Sapiens
tttatcttcacctttctcta

SEQ ID NO: 3877 - DNA, 20 bp, Homo Sapiens
ttatcttcacctttctctat

SEQ ID NO: 3878 - DNA, 20 bp, Homo Sapiens
tatcttcacctttctctata

SEQ ID NO: 3879 - DNA, 20 bp, Homo Sapiens
atcttcacctttctctatag

SEQ ID NO: 3880 - DNA, 20 bp, Homo Sapiens
tcttcacctttctctataga

SEQ ID NO: 3881 - DNA, 20 bp, Homo Sapiens
cttcacctttctctatagag

SEQ ID NO: 3882 - DNA, 20 bp, Homo Sapiens
ttcacctttctctatagagc

SEQ ID NO: 3883 - DNA, 20 bp, Homo Sapiens
tcacctttctctatagagct

SEQ ID NO: 3884 - DNA, 20 bp, Homo Sapiens
cacctttctctatagagctt

SEQ ID NO: 3885 - DNA, 20 bp, Homo Sapiens
acctttctctatagagcttg

SEQ ID NO: 3886 - DNA, 20 bp, Homo Sapiens
cctttctctatagagcttga

SEQ ID NO: 3887 - DNA, 20 bp, Homo Sapiens
ctttctctatagagcttgag

SEQ ID NO: 3888 - DNA, 20 bp, Homo Sapiens
tttctctatagagcttgagg

SEQ ID NO: 3889 - DNA, 20 bp, Homo Sapiens
ttctctatagagcttgagga

SEQ ID NO: 3890 - DNA, 20 bp, Homo Sapiens
tctctatagagcttgaggac

SEQ ID NO: 3891 - DNA, 20 bp, Homo Sapiens
ctctatagagcttgaggacc

SEQ ID NO: 3892 - DNA, 20 bp, Homo Sapiens
tctatagagcttgaggaccc

SEQ ID NO: 3893 - DNA, 20 bp, Homo Sapiens
ctatagagcttgaggaccct

SEQ ID NO: 3894 - DNA, 20 bp, Homo Sapiens
tatagagcttgaggaccctc

SEQ ID NO: 3895 - DNA, 20 bp, Homo Sapiens
atagagcttgaggaccctca

SEQ ID NO: 3896 - DNA, 20 bp, Homo Sapiens
tagagcttgaggaccctcag

SEQ ID NO: 3897 - DNA, 20 bp, Homo Sapiens
agagcttgaggaccctcagc

SEQ ID NO: 3898 - DNA, 20 bp, Homo Sapiens
gagcttgaggaccctcagcc

SEQ ID NO: 3899 - DNA, 20 bp, Homo Sapiens
agcttgaggaccctcagcct

SEQ ID NO: 3900 - DNA, 20 bp, Homo Sapiens
gcttgaggaccctcagcctc

SEQ ID NO: 3901 - DNA, 20 bp, Homo Sapiens
cttgaggaccctcagcctcc

SEQ ID NO: 3902 - DNA, 20 bp, Homo Sapiens
ttgaggaccctcagcctccc

SEQ ID NO: 3903 - DNA, 20 bp, Homo Sapiens
tgaggaccctcagcctcccc

SEQ ID NO: 3904 - DNA, 20 bp, Homo Sapiens
gaggaccctcagcctccccc

SEQ ID NO: 3905 - DNA, 20 bp, Homo Sapiens
aggaccctcagcctccccca

SEQ ID NO: 3906 - DNA, 20 bp, Homo Sapiens
ggaccctcagcctcccccag

SEQ ID NO: 3907 - DNA, 20 bp, Homo Sapiens
gaccctcagcctcccccaga

SEQ ID NO: 3908 - DNA, 20 bp, Homo Sapiens
accctcagcctcccccagac

SEQ ID NO: 3909 - DNA, 20 bp, Homo Sapiens
ccctcagcctcccccagacc

SEQ ID NO: 3910 - DNA, 20 bp, Homo Sapiens
cctcagcctcccccagacca

SEQ ID NO: 3911 - DNA, 20 bp, Homo Sapiens
ctcagcctcccccagaccac

SEQ ID NO: 3912 - DNA, 20 bp, Homo Sapiens
tcagcctcccccagaccaca

SEQ ID NO: 3913 - DNA, 20 bp, Homo Sapiens
cagcctcccccagaccacat

SEQ ID NO: 3914 - DNA, 20 bp, Homo Sapiens
agcctcccccagaccacatt

SEQ ID NO: 3915 - DNA, 20 bp, Homo Sapiens
gcctcccccagaccacattc

SEQ ID NO: 3916 - DNA, 20 bp, Homo Sapiens
cctcccccagaccacattcc

SEQ ID NO: 3917 - DNA, 20 bp, Homo Sapiens
ctcccccagaccacattcct

SEQ ID NO: 3918 - DNA, 20 bp, Homo Sapiens
tcccccagaccacattcctt

SEQ ID NO: 3919 - DNA, 20 bp, Homo Sapiens
cccccagaccacattccttg

SEQ ID NO: 3920 - DNA, 20 bp, Homo Sapiens
ccccagaccacattccttgg

SEQ ID NO: 3921 - DNA, 20 bp, Homo Sapiens
cccagaccacattccttgga

SEQ ID NO: 3922 - DNA, 20 bp, Homo Sapiens
ccagaccacattccttggat

SEQ ID NO: 3923 - DNA, 20 bp, Homo Sapiens
cagaccacattccttggatt

SEQ ID NO: 3924 - DNA, 20 bp, Homo Sapiens
agaccacattccttggatta

SEQ ID NO: 3925 - DNA, 20 bp, Homo Sapiens
gaccacattccttggattac

SEQ ID NO: 3926 - DNA, 20 bp, Homo Sapiens
accacattccttggattaca

SEQ ID NO: 3927 - DNA, 20 bp, Homo Sapiens
ccacattccttggattacag

SEQ ID NO: 3928 - DNA, 20 bp, Homo Sapiens
cacattccttggattacagc

SEQ ID NO: 3929 - DNA, 20 bp, Homo Sapiens
acattccttggattacagct

SEQ ID NO: 3930 - DNA, 20 bp, Homo Sapiens
cattccttggattacagctg

SEQ ID NO: 3931 - DNA, 20 bp, Homo Sapiens
attccttggattacagctgt

SEQ ID NO: 3932 - DNA, 20 bp, Homo Sapiens
ttccttggattacagctgta

SEQ ID NO: 3933 - DNA, 20 bp, Homo Sapiens
tccttggattacagctgtac

SEQ ID NO: 3934 - DNA, 20 bp, Homo Sapiens
ccttggattacagctgtact

SEQ ID NO: 3935 - DNA, 20 bp, Homo Sapiens
cttggattacagctgtactt

SEQ ID NO: 3936 - DNA, 20 bp, Homo Sapiens
ttggattacagctgtacttc

SEQ ID NO: 3937 - DNA, 20 bp, Homo Sapiens
tggattacagctgtacttcc

SEQ ID NO: 3938 - DNA, 20 bp, Homo Sapiens
ggattacagctgtacttcca

SEQ ID NO: 3939 - DNA, 20 bp, Homo Sapiens
gattacagctgtacttccaa

SEQ ID NO: 3940 - DNA, 20 bp, Homo Sapiens
attacagctgtacttccaac

SEQ ID NO: 3941 - DNA, 20 bp, Homo Sapiens
ttacagctgtacttccaaca

SEQ ID NO: 3942 - DNA, 20 bp, Homo Sapiens
tacagctgtacttccaacag

SEQ ID NO: 3943 - DNA, 20 bp, Homo Sapiens
acagctgtacttccaacagt

SEQ ID NO: 3944 - DNA, 20 bp, Homo Sapiens
cagctgtacttccaacagtt

SEQ ID NO: 3945 - DNA, 20 bp, Homo Sapiens
agctgtacttccaacagtta

SEQ ID NO: 3946 - DNA, 20 bp, Homo Sapiens
gctgtacttccaacagttat

SEQ ID NO: 3947 - DNA, 20 bp, Homo Sapiens
ctgtacttccaacagttatt

SEQ ID NO: 3948 - DNA, 20 bp, Homo Sapiens
tgtacttccaacagttatta

SEQ ID NO: 3949 - DNA, 20 bp, Homo Sapiens
gtacttccaacagttattat

SEQ ID NO: 3950 - DNA, 20 bp, Homo Sapiens
tacttccaacagttattata

SEQ ID NO: 3951 - DNA, 20 bp, Homo Sapiens
acttccaacagttattatat

SEQ ID NO: 3952 - DNA, 20 bp, Homo Sapiens
cttccaacagttattatatg

SEQ ID NO: 3953 - DNA, 20 bp, Homo Sapiens
ttccaacagttattatatgt

SEQ ID NO: 3954 - DNA, 20 bp, Homo Sapiens
tccaacagttattatatgtg

SEQ ID NO: 3955 - DNA, 20 bp, Homo Sapiens
ccaacagttattatatgtgt

SEQ ID NO: 3956 - DNA, 20 bp, Homo Sapiens
caacagttattatatgtgtg

SEQ ID NO: 3957 - DNA, 20 bp, Homo Sapiens
aacagttattatatgtgtga

SEQ ID NO: 3958 - DNA, 20 bp, Homo Sapiens
acagttattatatgtgtgat

SEQ ID NO: 3959 - DNA, 20 bp, Homo Sapiens
cagttattatatgtgtgatg

SEQ ID NO: 3960 - DNA, 20 bp, Homo Sapiens
agttattatatgtgtgatgg

SEQ ID NO: 3961 - DNA, 20 bp, Homo Sapiens
gttattatatgtgtgatggt

SEQ ID NO: 3962 - DNA, 20 bp, Homo Sapiens
ttattatatgtgtgatggtt

SEQ ID NO: 3963 - DNA, 20 bp, Homo Sapiens
tattatatgtgtgatggttt

SEQ ID NO: 3964 - DNA, 20 bp, Homo Sapiens
attatatgtgtgatggtttt

SEQ ID NO: 3965 - DNA, 20 bp, Homo Sapiens
ttatatgtgtgatggttttc

SEQ ID NO: 3966 - DNA, 20 bp, Homo Sapiens
tatatgtgtgatggttttct

SEQ ID NO: 3967 - DNA, 20 bp, Homo Sapiens
atatgtgtgatggttttctg

SEQ ID NO: 3968 - DNA, 20 bp, Homo Sapiens
tatgtgtgatggttttctgt

SEQ ID NO: 3969 - DNA, 20 bp, Homo Sapiens
atgtgtgatggttttctgtc

SEQ ID NO: 3970 - DNA, 20 bp, Homo Sapiens
tgtgtgatggttttctgtct

SEQ ID NO: 3971 - DNA, 20 bp, Homo Sapiens
gtgtgatggttttctgtcta

SEQ ID NO: 3972 - DNA, 20 bp, Homo Sapiens
tgtgatggttttctgtctaa

SEQ ID NO: 3973 - DNA, 20 bp, Homo Sapiens
gtgatggttttctgtctaat

SEQ ID NO: 3974 - DNA, 20 bp, Homo Sapiens
tgatggttttctgtctaatt

SEQ ID NO: 3975 - DNA, 20 bp, Homo Sapiens
gatggttttctgtctaattc

SEQ ID NO: 3976 - DNA, 20 bp, Homo Sapiens
atggttttctgtctaattct

SEQ ID NO: 3977 - DNA, 20 bp, Homo Sapiens
tggttttctgtctaattcta

SEQ ID NO: 3978 - DNA, 20 bp, Homo Sapiens
ggttttctgtctaattctat

SEQ ID NO: 3979 - DNA, 20 bp, Homo Sapiens
gttttctgtctaattctatg

SEQ ID NO: 3980 - DNA, 20 bp, Homo Sapiens
ttttctgtctaattctatgg

SEQ ID NO: 3981 - DNA, 20 bp, Homo Sapiens
tttctgtctaattctatgga

SEQ ID NO: 3982 - DNA, 20 bp, Homo Sapiens
ttctgtctaattctatggaa

SEQ ID NO: 3983 - DNA, 20 bp, Homo Sapiens
tctgtctaattctatggaaa

SEQ ID NO: 3984 - DNA, 20 bp, Homo Sapiens
ctgtctaattctatggaaat

SEQ ID NO: 3985 - DNA, 20 bp, Homo Sapiens
tgtctaattctatggaaatg

SEQ ID NO: 3986 - DNA, 20 bp, Homo Sapiens
gtctaattctatggaaatgg

SEQ ID NO: 3987 - DNA, 20 bp, Homo Sapiens
tctaattctatggaaatgga

SEQ ID NO: 3988 - DNA, 20 bp, Homo Sapiens
ctaattctatggaaatggaa

SEQ ID NO: 3989 - DNA, 20 bp, Homo Sapiens
taattctatggaaatggaag

SEQ ID NO: 3990 - DNA, 20 bp, Homo Sapiens
aattctatggaaatggaaga

SEQ ID NO: 3991 - DNA, 20 bp, Homo Sapiens
attctatggaaatggaagaa

SEQ ID NO: 3992 - DNA, 20 bp, Homo Sapiens
ttctatggaaatggaagaag

SEQ ID NO: 3993 - DNA, 20 bp, Homo Sapiens
tctatggaaatggaagaaga

SEQ ID NO: 3994 - DNA, 20 bp, Homo Sapiens
ctatggaaatggaagaagaa

SEQ ID NO: 3995 - DNA, 20 bp, Homo Sapiens
tatggaaatggaagaagaag

SEQ ID NO: 3996 - DNA, 20 bp, Homo Sapiens
atggaaatggaagaagaaga

SEQ ID NO: 3997 - DNA, 20 bp, Homo Sapiens
tggaaatggaagaagaagaa

SEQ ID NO: 3998 - DNA, 20 bp, Homo Sapiens
ggaaatggaagaagaagaag

SEQ ID NO: 3999 - DNA, 20 bp, Homo Sapiens
gaaatggaagaagaagaagc

SEQ ID NO: 4000 - DNA, 20 bp, Homo Sapiens
aaatggaagaagaagaagcg

SEQ ID NO: 4001 - DNA, 20 bp, Homo Sapiens
aatggaagaagaagaagcgg

SEQ ID NO: 4002 - DNA, 20 bp, Homo Sapiens
atggaagaagaagaagcggc

SEQ ID NO: 4003 - DNA, 20 bp, Homo Sapiens
tggaagaagaagaagcggcc

SEQ ID NO: 4004 - DNA, 20 bp, Homo Sapiens
ggaagaagaagaagcggcct

SEQ ID NO: 4005 - DNA, 20 bp, Homo Sapiens
gaagaagaagaagcggcctc

SEQ ID NO: 4006 - DNA, 20 bp, Homo Sapiens
aagaagaagaagcggcctcg

SEQ ID NO: 4007 - DNA, 20 bp, Homo Sapiens
agaagaagaagcggcctcgc

SEQ ID NO: 4008 - DNA, 20 bp, Homo Sapiens
gaagaagaagcggcctcgca

SEQ ID NO: 4009 - DNA, 20 bp, Homo Sapiens
aagaagaagcggcctcgcaa

SEQ ID NO: 4010 - DNA, 20 bp, Homo Sapiens
agaagaagcggcctcgcaac

SEQ ID NO: 4011 - DNA, 20 bp, Homo Sapiens
gaagaagcggcctcgcaact

SEQ ID NO: 4012 - DNA, 20 bp, Homo Sapiens
aagaagcggcctcgcaactc

SEQ ID NO: 4013 - DNA, 20 bp, Homo Sapiens
agaagcggcctcgcaactct

SEQ ID NO: 4014 - DNA, 20 bp, Homo Sapiens
gaagcggcctcgcaactctt

SEQ ID NO: 4015 - DNA, 20 bp, Homo Sapiens
aagcggcctcgcaactctta

SEQ ID NO: 4016 - DNA, 20 bp, Homo Sapiens
agcggcctcgcaactcttat

SEQ ID NO: 4017 - DNA, 20 bp, Homo Sapiens
gcggcctcgcaactcttata

SEQ ID NO: 4018 - DNA, 20 bp, Homo Sapiens
cggcctcgcaactcttataa

SEQ ID NO: 4019 - DNA, 20 bp, Homo Sapiens
ggcctcgcaactcttataaa

SEQ ID NO: 4020 - DNA, 20 bp, Homo Sapiens
gcctcgcaactcttataaat

SEQ ID NO: 4021 - DNA, 20 bp, Homo Sapiens
cctcgcaactcttataaatg

SEQ ID NO: 4022 - DNA, 20 bp, Homo Sapiens
ctcgcaactcttataaatgt

SEQ ID NO: 4023 - DNA, 20 bp, Homo Sapiens
tcgcaactcttataaatgtg

SEQ ID NO: 4024 - DNA, 20 bp, Homo Sapiens
cgcaactcttataaatgtgg

SEQ ID NO: 4025 - DNA, 20 bp, Homo Sapiens
gcaactcttataaatgtgga

SEQ ID NO: 4026 - DNA, 20 bp, Homo Sapiens
caactcttataaatgtggaa

SEQ ID NO: 4027 - DNA, 20 bp, Homo Sapiens
aactcttataaatgtggaac

SEQ ID NO: 4028 - DNA, 20 bp, Homo Sapiens
actcttataaatgtggaacc

SEQ ID NO: 4029 - DNA, 20 bp, Homo Sapiens
ctcttataaatgtggaacca

SEQ ID NO: 4030 - DNA, 20 bp, Homo Sapiens
tcttataaatgtggaaccaa

SEQ ID NO: 4031 - DNA, 20 bp, Homo Sapiens
cttataaatgtggaaccaac

SEQ ID NO: 4032 - DNA, 20 bp, Homo Sapiens
ttataaatgtggaaccaaca

SEQ ID NO: 4033 - DNA, 20 bp, Homo Sapiens
tataaatgtggaaccaacac

SEQ ID NO: 4034 - DNA, 20 bp, Homo Sapiens
ataaatgtggaaccaacaca

SEQ ID NO: 4035 - DNA, 20 bp, Homo Sapiens
taaatgtggaaccaacacaa

SEQ ID NO: 4036 - DNA, 20 bp, Homo Sapiens
aaatgtggaaccaacacaat

SEQ ID NO: 4037 - DNA, 20 bp, Homo Sapiens
aatgtggaaccaacacaatg

SEQ ID NO: 4038 - DNA, 20 bp, Homo Sapiens
atgtggaaccaacacaatgg

SEQ ID NO: 4039 - DNA, 20 bp, Homo Sapiens
tgtggaaccaacacaatgga

SEQ ID NO: 4040 - DNA, 20 bp, Homo Sapiens
gtggaaccaacacaatggag

SEQ ID NO: 4041 - DNA, 20 bp, Homo Sapiens
tggaaccaacacaatggaga

SEQ ID NO: 4042 - DNA, 20 bp, Homo Sapiens
ggaaccaacacaatggagag

SEQ ID NO: 4043 - DNA, 20 bp, Homo Sapiens
gaaccaacacaatggagagg

SEQ ID NO: 4044 - DNA, 20 bp, Homo Sapiens
aaccaacacaatggagaggg

SEQ ID NO: 4045 - DNA, 20 bp, Homo Sapiens
accaacacaatggagaggga

SEQ ID NO: 4046 - DNA, 20 bp, Homo Sapiens
ccaacacaatggagagggaa

SEQ ID NO: 4047 - DNA, 20 bp, Homo Sapiens
caacacaatggagagggaag

SEQ ID NO: 4048 - DNA, 20 bp, Homo Sapiens
aacacaatggagagggaaga

SEQ ID NO: 4049 - DNA, 20 bp, Homo Sapiens
acacaatggagagggaagag

SEQ ID NO: 4050 - DNA, 20 bp, Homo Sapiens
cacaatggagagggaagaga

SEQ ID NO: 4051 - DNA, 20 bp, Homo Sapiens
acaatggagagggaagagag

SEQ ID NO: 4052 - DNA, 20 bp, Homo Sapiens
caatggagagggaagagagt

SEQ ID NO: 4053 - DNA, 20 bp, Homo Sapiens
aatggagagggaagagagtg

SEQ ID NO: 4054 - DNA, 20 bp, Homo Sapiens
atggagagggaagagagtga

SEQ ID NO: 4055 - DNA, 20 bp, Homo Sapiens
tggagagggaagagagtgaa

SEQ ID NO: 4056 - DNA, 20 bp, Homo Sapiens
ggagagggaagagagtgaac

SEQ ID NO: 4057 - DNA, 20 bp, Homo Sapiens
gagagggaagagagtgaaca

SEQ ID NO: 4058 - DNA, 20 bp, Homo Sapiens
agagggaagagagtgaacag

SEQ ID NO: 4059 - DNA, 20 bp, Homo Sapiens
gagggaagagagtgaacaga

SEQ ID NO: 4060 - DNA, 20 bp, Homo Sapiens
agggaagagagtgaacagac

SEQ ID NO: 4061 - DNA, 20 bp, Homo Sapiens
gggaagagagtgaacagacc

SEQ ID NO: 4062 - DNA, 20 bp, Homo Sapiens
ggaagagagtgaacagacca

SEQ ID NO: 4063 - DNA, 20 bp, Homo Sapiens
gaagagagtgaacagaccaa

SEQ ID NO: 4064 - DNA, 20 bp, Homo Sapiens
aagagagtgaacagaccaag

SEQ ID NO: 4065 - DNA, 20 bp, Homo Sapiens
agagagtgaacagaccaaga

SEQ ID NO: 4066 - DNA, 20 bp, Homo Sapiens
gagagtgaacagaccaagaa

SEQ ID NO: 4067 - DNA, 20 bp, Homo Sapiens
agagtgaacagaccaagaaa

SEQ ID NO: 4068 - DNA, 20 bp, Homo Sapiens
gagtgaacagaccaagaaaa

SEQ ID NO: 4069 - DNA, 20 bp, Homo Sapiens
agtgaacagaccaagaaaag

SEQ ID NO: 4070 - DNA, 20 bp, Homo Sapiens
gtgaacagaccaagaaaaga

SEQ ID NO: 4071 - DNA, 20 bp, Homo Sapiens
tgaacagaccaagaaaagag

SEQ ID NO: 4072 - DNA, 20 bp, Homo Sapiens
gaacagaccaagaaaagaga

SEQ ID NO: 4073 - DNA, 20 bp, Homo Sapiens
aacagaccaagaaaagagaa

SEQ ID NO: 4074 - DNA, 20 bp, Homo Sapiens
acagaccaagaaaagagaaa

SEQ ID NO: 4075 - DNA, 20 bp, Homo Sapiens
cagaccaagaaaagagaaaa

SEQ ID NO: 4076 - DNA, 20 bp, Homo Sapiens
agaccaagaaaagagaaaaa

SEQ ID NO: 4077 - DNA, 20 bp, Homo Sapiens
gaccaagaaaagagaaaaaa

SEQ ID NO: 4078 - DNA, 20 bp, Homo Sapiens
accaagaaaagagaaaaaat

SEQ ID NO: 4079 - DNA, 20 bp, Homo Sapiens
ccaagaaaagagaaaaaatc

SEQ ID NO: 4080 - DNA, 20 bp, Homo Sapiens
caagaaaagagaaaaaatcc

SEQ ID NO: 4081 - DNA, 20 bp, Homo Sapiens
aagaaaagagaaaaaatcca

SEQ ID NO: 4082 - DNA, 20 bp, Homo Sapiens
agaaaagagaaaaaatccat

SEQ ID NO: 4083 - DNA, 20 bp, Homo Sapiens
gaaaagagaaaaaatccata

SEQ ID NO: 4084 - DNA, 20 bp, Homo Sapiens
aaaagagaaaaaatccatat

SEQ ID NO: 4085 - DNA, 20 bp, Homo Sapiens
aaagagaaaaaatccatata

SEQ ID NO: 4086 - DNA, 20 bp, Homo Sapiens
aagagaaaaaatccatatac

SEQ ID NO: 4087 - DNA, 20 bp, Homo Sapiens
agagaaaaaatccatatacc

SEQ ID NO: 4088 - DNA, 20 bp, Homo Sapiens
gagaaaaaatccatatacct

SEQ ID NO: 4089 - DNA, 20 bp, Homo Sapiens
agaaaaaatccatatacctg

SEQ ID NO: 4090 - DNA, 20 bp, Homo Sapiens
gaaaaaatccatatacctga

SEQ ID NO: 4091 - DNA, 20 bp, Homo Sapiens
aaaaaatccatatacctgaa

SEQ ID NO: 4092 - DNA, 20 bp, Homo Sapiens
aaaaatccatatacctgaaa

SEQ ID NO: 4093 - DNA, 20 bp, Homo Sapiens
aaaatccatatacctgaaag

SEQ ID NO: 4094 - DNA, 20 bp, Homo Sapiens
aaatccatatacctgaaaga

SEQ ID NO: 4095 - DNA, 20 bp, Homo Sapiens
aatccatatacctgaaagat

SEQ ID NO: 4096 - DNA, 20 bp, Homo Sapiens
atccatatacctgaaagatc

SEQ ID NO: 4097 - DNA, 20 bp, Homo Sapiens
tccatatacctgaaagatct

SEQ ID NO: 4098 - DNA, 20 bp, Homo Sapiens
ccatatacctgaaagatctg

SEQ ID NO: 4099 - DNA, 20 bp, Homo Sapiens
catatacctgaaagatctga

SEQ ID NO: 4100 - DNA, 20 bp, Homo Sapiens
atatacctgaaagatctgat

SEQ ID NO: 4101 - DNA, 20 bp, Homo Sapiens
tatacctgaaagatctgatg

SEQ ID NO: 4102 - DNA, 20 bp, Homo Sapiens
atacctgaaagatctgatga

SEQ ID NO: 4103 - DNA, 20 bp, Homo Sapiens
tacctgaaagatctgatgaa

SEQ ID NO: 4104 - DNA, 20 bp, Homo Sapiens
acctgaaagatctgatgaag

SEQ ID NO: 4105 - DNA, 20 bp, Homo Sapiens
cctgaaagatctgatgaagc

SEQ ID NO: 4106 - DNA, 20 bp, Homo Sapiens
ctgaaagatctgatgaagcc

SEQ ID NO: 4107 - DNA, 20 bp, Homo Sapiens
tgaaagatctgatgaagccc

SEQ ID NO: 4108 - DNA, 20 bp, Homo Sapiens
gaaagatctgatgaagccca

SEQ ID NO: 4109 - DNA, 20 bp, Homo Sapiens
aaagatctgatgaagcccag

SEQ ID NO: 4110 - DNA, 20 bp, Homo Sapiens
aagatctgatgaagcccagc

SEQ ID NO: 4111 - DNA, 20 bp, Homo Sapiens
agatctgatgaagcccagcg

SEQ ID NO: 4112 - DNA, 20 bp, Homo Sapiens
gatctgatgaagcccagcgt

SEQ ID NO: 4113 - DNA, 20 bp, Homo Sapiens
atctgatgaagcccagcgtg

SEQ ID NO: 4114 - DNA, 20 bp, Homo Sapiens
tctgatgaagcccagcgtgt

SEQ ID NO: 4115 - DNA, 20 bp, Homo Sapiens
ctgatgaagcccagcgtgtt

SEQ ID NO: 4116 - DNA, 20 bp, Homo Sapiens
tgatgaagcccagcgtgttt

SEQ ID NO: 4117 - DNA, 20 bp, Homo Sapiens
gatgaagcccagcgtgtttt

SEQ ID NO: 4118 - DNA, 20 bp, Homo Sapiens
atgaagcccagcgtgttttt

SEQ ID NO: 4119 - DNA, 20 bp, Homo Sapiens
tgaagcccagcgtgttttta

SEQ ID NO: 4120 - DNA, 20 bp, Homo Sapiens
gaagcccagcgtgtttttaa

SEQ ID NO: 4121 - DNA, 20 bp, Homo Sapiens
aagcccagcgtgtttttaaa

SEQ ID NO: 4122 - DNA, 20 bp, Homo Sapiens
agcccagcgtgtttttaaaa

SEQ ID NO: 4123 - DNA, 20 bp, Homo Sapiens
gcccagcgtgtttttaaaag

SEQ ID NO: 4124 - DNA, 20 bp, Homo Sapiens
cccagcgtgtttttaaaagt

SEQ ID NO: 4125 - DNA, 20 bp, Homo Sapiens
ccagcgtgtttttaaaagtt

SEQ ID NO: 4126 - DNA, 20 bp, Homo Sapiens
cagcgtgtttttaaaagttc

SEQ ID NO: 4127 - DNA, 20 bp, Homo Sapiens
agcgtgtttttaaaagttcg

SEQ ID NO: 4128 - DNA, 20 bp, Homo Sapiens
gcgtgtttttaaaagttcga

SEQ ID NO: 4129 - DNA, 20 bp, Homo Sapiens
cgtgtttttaaaagttcgaa

SEQ ID NO: 4130 - DNA, 20 bp, Homo Sapiens
gtgtttttaaaagttcgaag

SEQ ID NO: 4131 - DNA, 20 bp, Homo Sapiens
tgtttttaaaagttcgaaga

SEQ ID NO: 4132 - DNA, 20 bp, Homo Sapiens
gtttttaaaagttcgaagac

SEQ ID NO: 4133 - DNA, 20 bp, Homo Sapiens
tttttaaaagttcgaagaca

SEQ ID NO: 4134 - DNA, 20 bp, Homo Sapiens
ttttaaaagttcgaagacat

SEQ ID NO: 4135 - DNA, 20 bp, Homo Sapiens
tttaaaagttcgaagacatc

SEQ ID NO: 4136 - DNA, 20 bp, Homo Sapiens
ttaaaagttcgaagacatct

SEQ ID NO: 4137 - DNA, 20 bp, Homo Sapiens
taaaagttcgaagacatctt

SEQ ID NO: 4138 - DNA, 20 bp, Homo Sapiens
aaaagttcgaagacatcttc

SEQ ID NO: 4139 - DNA, 20 bp, Homo Sapiens
aaagttcgaagacatcttca

SEQ ID NO: 4140 - DNA, 20 bp, Homo Sapiens
aagttcgaagacatcttcat

SEQ ID NO: 4141 - DNA, 20 bp, Homo Sapiens
agttcgaagacatcttcatg

SEQ ID NO: 4142 - DNA, 20 bp, Homo Sapiens
gttcgaagacatcttcatgc

SEQ ID NO: 4143 - DNA, 20 bp, Homo Sapiens
ttcgaagacatcttcatgcg

SEQ ID NO: 4144 - DNA, 20 bp, Homo Sapiens
tcgaagacatcttcatgcga

SEQ ID NO: 4145 - DNA, 20 bp, Homo Sapiens
cgaagacatcttcatgcgac

SEQ ID NO: 4146 - DNA, 20 bp, Homo Sapiens
gaagacatcttcatgcgaca

SEQ ID NO: 4147 - DNA, 20 bp, Homo Sapiens
aagacatcttcatgcgacaa

SEQ ID NO: 4148 - DNA, 20 bp, Homo Sapiens
agacatcttcatgcgacaaa

SEQ ID NO: 4149 - DNA, 20 bp, Homo Sapiens
gacatcttcatgcgacaaaa

SEQ ID NO: 4150 - DNA, 20 bp, Homo Sapiens
acatcttcatgcgacaaaag

SEQ ID NO: 4151 - DNA, 20 bp, Homo Sapiens
catcttcatgcgacaaaagt

SEQ ID NO: 4152 - DNA, 20 bp, Homo Sapiens
atcttcatgcgacaaaagtg

SEQ ID NO: 4153 - DNA, 20 bp, Homo Sapiens
tcttcatgcgacaaaagtga

SEQ ID NO: 4154 - DNA, 20 bp, Homo Sapiens
cttcatgcgacaaaagtgat

SEQ ID NO: 4155 - DNA, 20 bp, Homo Sapiens
ttcatgcgacaaaagtgata

SEQ ID NO: 4156 - DNA, 20 bp, Homo Sapiens
tcatgcgacaaaagtgatac

SEQ ID NO: 4157 - DNA, 20 bp, Homo Sapiens
catgcgacaaaagtgataca

SEQ ID NO: 4158 - DNA, 20 bp, Homo Sapiens
atgcgacaaaagtgatacat

SEQ ID NO: 4159 - DNA, 20 bp, Homo Sapiens
tgcgacaaaagtgatacatg

SEQ ID NO: 4160 - DNA, 20 bp, Homo Sapiens
gcgacaaaagtgatacatgt

SEQ ID NO: 4161 - DNA, 20 bp, Homo Sapiens
cgacaaaagtgatacatgtt

SEQ ID NO: 4162 - DNA, 20 bp, Homo Sapiens
gacaaaagtgatacatgttt

SEQ ID NO: 4163 - DNA, 20 bp, Homo Sapiens
acaaaagtgatacatgtttt

SEQ ID NO: 4164 - DNA, 20 bp, Homo Sapiens
caaaagtgatacatgttttt

SEQ ID NO: 4165 - DNA, 20 bp, Homo Sapiens
aaaagtgatacatgttttta

SEQ ID NO: 4166 - DNA, 20 bp, Homo Sapiens
aaagtgatacatgtttttaa

SEQ ID NO: 4167 - DNA, 20 bp, Homo Sapiens
aagtgatacatgtttttaat

SEQ ID NO: 4168 - DNA, 20 bp, Homo Sapiens
agtgatacatgtttttaatt

SEQ ID NO: 4169 - DNA, 20 bp, Homo Sapiens
gtgatacatgtttttaatta

SEQ ID NO: 4170 - DNA, 20 bp, Homo Sapiens
tgatacatgtttttaattaa

SEQ ID NO: 4171 - DNA, 20 bp, Homo Sapiens
gatacatgtttttaattaaa

SEQ ID NO: 4172 - DNA, 20 bp, Homo Sapiens
atacatgtttttaattaaag

SEQ ID NO: 4173 - DNA, 20 bp, Homo Sapiens
tacatgtttttaattaaaga

SEQ ID NO: 4174 - DNA, 20 bp, Homo Sapiens
acatgtttttaattaaagag

SEQ ID NO: 4175 - DNA, 20 bp, Homo Sapiens
catgtttttaattaaagagt

SEQ ID NO: 4176 - DNA, 20 bp, Homo Sapiens
atgtttttaattaaagagta

SEQ ID NO: 4177 - DNA, 20 bp, Homo Sapiens
tgtttttaattaaagagtaa

SEQ ID NO: 4178 - DNA, 20 bp, Homo Sapiens
gtttttaattaaagagtaaa

SEQ ID NO: 4179 - DNA, 20 bp, Homo Sapiens
tttttaattaaagagtaaag

SEQ ID NO: 4180 - DNA, 20 bp, Homo Sapiens
ttttaattaaagagtaaagc

SEQ ID NO: 4181 - DNA, 20 bp, Homo Sapiens
tttaattaaagagtaaagcc

SEQ ID NO: 4182 - DNA, 20 bp, Homo Sapiens
ttaattaaagagtaaagccc

SEQ ID NO: 4183 - DNA, 20 bp, Homo Sapiens
taattaaagagtaaagccca

SEQ ID NO: 4184 - DNA, 20 bp, Homo Sapiens
aattaaagagtaaagcccat

SEQ ID NO: 4185 - DNA, 20 bp, Homo Sapiens
attaaagagtaaagcccata

SEQ ID NO: 4186 - DNA, 20 bp, Homo Sapiens
ttaaagagtaaagcccatac

SEQ ID NO: 4187 - DNA, 20 bp, Homo Sapiens
taaagagtaaagcccataca

SEQ ID NO: 4188 - DNA, 20 bp, Homo Sapiens
aaagagtaaagcccatacaa

SEQ ID NO: 4189 - DNA, 20 bp, Homo Sapiens
aagagtaaagcccatacaag

SEQ ID NO: 4190 - DNA, 20 bp, Homo Sapiens
agagtaaagcccatacaagt

SEQ ID NO: 4191 - DNA, 20 bp, Homo Sapiens
gagtaaagcccatacaagta

SEQ ID NO: 4192 - DNA, 20 bp, Homo Sapiens
agtaaagcccatacaagtat

SEQ ID NO: 4193 - DNA, 20 bp, Homo Sapiens
gtaaagcccatacaagtatt

SEQ ID NO: 4194 - DNA, 20 bp, Homo Sapiens
taaagcccatacaagtattc

SEQ ID NO: 4195 - DNA, 20 bp, Homo Sapiens
aaagcccatacaagtattca

SEQ ID NO: 4196 - DNA, 20 bp, Homo Sapiens
aagcccatacaagtattcat

SEQ ID NO: 4197 - DNA, 20 bp, Homo Sapiens
agcccatacaagtattcatt

SEQ ID NO: 4198 - DNA, 20 bp, Homo Sapiens
gcccatacaagtattcattt

SEQ ID NO: 4199 - DNA, 20 bp, Homo Sapiens
cccatacaagtattcatttt

SEQ ID NO: 4200 - DNA, 20 bp, Homo Sapiens
ccatacaagtattcattttt

SEQ ID NO: 4201 - DNA, 20 bp, Homo Sapiens
catacaagtattcatttttt

SEQ ID NO: 4202 - DNA, 20 bp, Homo Sapiens
atacaagtattcattttttc

SEQ ID NO: 4203 - DNA, 20 bp, Homo Sapiens
tacaagtattcattttttct

SEQ ID NO: 4204 - DNA, 20 bp, Homo Sapiens
acaagtattcattttttcta

SEQ ID NO: 4205 - DNA, 20 bp, Homo Sapiens
caagtattcattttttctac

SEQ ID NO: 4206 - DNA, 20 bp, Homo Sapiens
aagtattcattttttctacc

SEQ ID NO: 4207 - DNA, 20 bp, Homo Sapiens
agtattcattttttctaccc

SEQ ID NO: 4208 - DNA, 20 bp, Homo Sapiens
gtattcattttttctaccct

SEQ ID NO: 4209 - DNA, 20 bp, Homo Sapiens
tattcattttttctaccctt

SEQ ID NO: 4210 - DNA, 20 bp, Homo Sapiens
attcattttttctacccttt

SEQ ID NO: 4211 - DNA, 20 bp, Homo Sapiens
ttcattttttctaccctttc

SEQ ID NO: 4212 - DNA, 20 bp, Homo Sapiens
tcattttttctaccctttcc

SEQ ID NO: 4213 - DNA, 20 bp, Homo Sapiens
cattttttctaccctttcct

SEQ ID NO: 4214 - DNA, 20 bp, Homo Sapiens
attttttctaccctttcctt

SEQ ID NO: 4215 - DNA, 20 bp, Homo Sapiens
ttttttctaccctttccttt

SEQ ID NO: 4216 - DNA, 20 bp, Homo Sapiens
tttttctaccctttcctttg

SEQ ID NO: 4217 - DNA, 20 bp, Homo Sapiens
ttttctaccctttcctttgt

SEQ ID NO: 4218 - DNA, 20 bp, Homo Sapiens
tttctaccctttcctttgta

SEQ ID NO: 4219 - DNA, 20 bp, Homo Sapiens
ttctaccctttcctttgtaa

SEQ ID NO: 4220 - DNA, 20 bp, Homo Sapiens
tctaccctttcctttgtaag

SEQ ID NO: 4221 - DNA, 20 bp, Homo Sapiens
ctaccctttcctttgtaagt

SEQ ID NO: 4222 - DNA, 20 bp, Homo Sapiens
taccctttcctttgtaagtt

SEQ ID NO: 4223 - DNA, 20 bp, Homo Sapiens
accctttcctttgtaagttc

SEQ ID NO: 4224 - DNA, 20 bp, Homo Sapiens
ccctttcctttgtaagttcc

SEQ ID NO: 4225 - DNA, 20 bp, Homo Sapiens
cctttcctttgtaagttcct

SEQ ID NO: 4226 - DNA, 20 bp, Homo Sapiens
ctttcctttgtaagttcctg

SEQ ID NO: 4227 - DNA, 20 bp, Homo Sapiens
tttcctttgtaagttcctgg

SEQ ID NO: 4228 - DNA, 20 bp, Homo Sapiens
ttcctttgtaagttcctggg

SEQ ID NO: 4229 - DNA, 20 bp, Homo Sapiens
tcctttgtaagttcctgggc

SEQ ID NO: 4230 - DNA, 20 bp, Homo Sapiens
cctttgtaagttcctgggca

SEQ ID NO: 4231 - DNA, 20 bp, Homo Sapiens
ctttgtaagttcctgggcaa

SEQ ID NO: 4232 - DNA, 20 bp, Homo Sapiens
tttgtaagttcctgggcaac

SEQ ID NO: 4233 - DNA, 20 bp, Homo Sapiens
ttgtaagttcctgggcaacc

SEQ ID NO: 4234 - DNA, 20 bp, Homo Sapiens
tgtaagttcctgggcaacct

SEQ ID NO: 4235 - DNA, 20 bp, Homo Sapiens
gtaagttcctgggcaacctt

SEQ ID NO: 4236 - DNA, 20 bp, Homo Sapiens
taagttcctgggcaaccttt

SEQ ID NO: 4237 - DNA, 20 bp, Homo Sapiens
aagttcctgggcaacctttt

SEQ ID NO: 4238 - DNA, 20 bp, Homo Sapiens
agttcctgggcaaccttttt

SEQ ID NO: 4239 - DNA, 20 bp, Homo Sapiens
gttcctgggcaacctttttg

SEQ ID NO: 4240 - DNA, 20 bp, Homo Sapiens
ttcctgggcaacctttttga

SEQ ID NO: 4241 - DNA, 20 bp, Homo Sapiens
tcctgggcaacctttttgat

SEQ ID NO: 4242 - DNA, 20 bp, Homo Sapiens
cctgggcaacctttttgatt

SEQ ID NO: 4243 - DNA, 20 bp, Homo Sapiens
ctgggcaacctttttgattt

SEQ ID NO: 4244 - DNA, 20 bp, Homo Sapiens
tgggcaacctttttgatttc

SEQ ID NO: 4245 - DNA, 20 bp, Homo Sapiens
gggcaacctttttgatttct

SEQ ID NO: 4246 - DNA, 20 bp, Homo Sapiens
ggcaacctttttgatttctt

SEQ ID NO: 4247 - DNA, 20 bp, Homo Sapiens
gcaacctttttgatttcttc

SEQ ID NO: 4248 - DNA, 20 bp, Homo Sapiens
caacctttttgatttcttcc

SEQ ID NO: 4249 - DNA, 20 bp, Homo Sapiens
aacctttttgatttcttcca

SEQ ID NO: 4250 - DNA, 20 bp, Homo Sapiens
acctttttgatttcttccag

SEQ ID NO: 4251 - DNA, 20 bp, Homo Sapiens
cctttttgatttcttccaga

SEQ ID NO: 4252 - DNA, 20 bp, Homo Sapiens
ctttttgatttcttccagaa

SEQ ID NO: 4253 - DNA, 20 bp, Homo Sapiens
tttttgatttcttccagaag

SEQ ID NO: 4254 - DNA, 20 bp, Homo Sapiens
ttttgatttcttccagaagg

SEQ ID NO: 4255 - DNA, 20 bp, Homo Sapiens
tttgatttcttccagaaggc

SEQ ID NO: 4256 - DNA, 20 bp, Homo Sapiens
ttgatttcttccagaaggca

SEQ ID NO: 4257 - DNA, 20 bp, Homo Sapiens
tgatttcttccagaaggcaa

SEQ ID NO: 4258 - DNA, 20 bp, Homo Sapiens
gatttcttccagaaggcaaa

SEQ ID NO: 4259 - DNA, 20 bp, Homo Sapiens
atttcttccagaaggcaaaa

SEQ ID NO: 4260 - DNA, 20 bp, Homo Sapiens
tttcttccagaaggcaaaaa

SEQ ID NO: 4261 - DNA, 20 bp, Homo Sapiens
ttcttccagaaggcaaaaag

SEQ ID NO: 4262 - DNA, 20 bp, Homo Sapiens
tcttccagaaggcaaaaaga

SEQ ID NO: 4263 - DNA, 20 bp, Homo Sapiens
cttccagaaggcaaaaagac

SEQ ID NO: 4264 - DNA, 20 bp, Homo Sapiens
ttccagaaggcaaaaagaca

SEQ ID NO: 4265 - DNA, 20 bp, Homo Sapiens
tccagaaggcaaaaagacat

SEQ ID NO: 4266 - DNA, 20 bp, Homo Sapiens
ccagaaggcaaaaagacatt

SEQ ID NO: 4267 - DNA, 20 bp, Homo Sapiens
cagaaggcaaaaagacatta

SEQ ID NO: 4268 - DNA, 20 bp, Homo Sapiens
agaaggcaaaaagacattac

SEQ ID NO: 4269 - DNA, 20 bp, Homo Sapiens
gaaggcaaaaagacattacc

SEQ ID NO: 4270 - DNA, 20 bp, Homo Sapiens
aaggcaaaaagacattacca

SEQ ID NO: 4271 - DNA, 20 bp, Homo Sapiens
aggcaaaaagacattaccat

SEQ ID NO: 4272 - DNA, 20 bp, Homo Sapiens
ggcaaaaagacattaccatg

SEQ ID NO: 4273 - DNA, 20 bp, Homo Sapiens
gcaaaaagacattaccatga

SEQ ID NO: 4274 - DNA, 20 bp, Homo Sapiens
caaaaagacattaccatgag

SEQ ID NO: 4275 - DNA, 20 bp, Homo Sapiens
aaaaagacattaccatgagt

SEQ ID NO: 4276 - DNA, 20 bp, Homo Sapiens
aaaagacattaccatgagta

SEQ ID NO: 4277 - DNA, 20 bp, Homo Sapiens
aaagacattaccatgagtaa

SEQ ID NO: 4278 - DNA, 20 bp, Homo Sapiens
aagacattaccatgagtaat

SEQ ID NO: 4279 - DNA, 20 bp, Homo Sapiens
agacattaccatgagtaata

SEQ ID NO: 4280 - DNA, 20 bp, Homo Sapiens
gacattaccatgagtaataa

SEQ ID NO: 4281 - DNA, 20 bp, Homo Sapiens
acattaccatgagtaataag

SEQ ID NO: 4282 - DNA, 20 bp, Homo Sapiens
cattaccatgagtaataagg

SEQ ID NO: 4283 - DNA, 20 bp, Homo Sapiens
attaccatgagtaataaggg

SEQ ID NO: 4284 - DNA, 20 bp, Homo Sapiens
ttaccatgagtaataagggg

SEQ ID NO: 4285 - DNA, 20 bp, Homo Sapiens
taccatgagtaataaggggg

SEQ ID NO: 4286 - DNA, 20 bp, Homo Sapiens
accatgagtaataagggggc

SEQ ID NO: 4287 - DNA, 20 bp, Homo Sapiens
ccatgagtaataagggggct

SEQ ID NO: 4288 - DNA, 20 bp, Homo Sapiens
catgagtaataagggggctc

SEQ ID NO: 4289 - DNA, 20 bp, Homo Sapiens
atgagtaataagggggctcc

SEQ ID NO: 4290 - DNA, 20 bp, Homo Sapiens
tgagtaataagggggctcca

SEQ ID NO: 4291 - DNA, 20 bp, Homo Sapiens
gagtaataagggggctccag

SEQ ID NO: 4292 - DNA, 20 bp, Homo Sapiens
agtaataagggggctccagg

SEQ ID NO: 4293 - DNA, 20 bp, Homo Sapiens
gtaataagggggctccagga

SEQ ID NO: 4294 - DNA, 20 bp, Homo Sapiens
taataagggggctccaggac

SEQ ID NO: 4295 - DNA, 20 bp, Homo Sapiens
aataagggggctccaggact

SEQ ID NO: 4296 - DNA, 20 bp, Homo Sapiens
ataagggggctccaggactc

SEQ ID NO: 4297 - DNA, 20 bp, Homo Sapiens
taagggggctccaggactcc

SEQ ID NO: 4298 - DNA, 20 bp, Homo Sapiens
aagggggctccaggactccc

SEQ ID NO: 4299 - DNA, 20 bp, Homo Sapiens
agggggctccaggactccct

SEQ ID NO: 4300 - DNA, 20 bp, Homo Sapiens
gggggctccaggactccctc

SEQ ID NO: 4301 - DNA, 20 bp, Homo Sapiens
ggggctccaggactccctct

SEQ ID NO: 4302 - DNA, 20 bp, Homo Sapiens
gggctccaggactccctcta

SEQ ID NO: 4303 - DNA, 20 bp, Homo Sapiens
ggctccaggactccctctaa

SEQ ID NO: 4304 - DNA, 20 bp, Homo Sapiens
gctccaggactccctctaag

SEQ ID NO: 4305 - DNA, 20 bp, Homo Sapiens
ctccaggactccctctaagt

SEQ ID NO: 4306 - DNA, 20 bp, Homo Sapiens
tccaggactccctctaagtg

SEQ ID NO: 4307 - DNA, 20 bp, Homo Sapiens
ccaggactccctctaagtgg

SEQ ID NO: 4308 - DNA, 20 bp, Homo Sapiens
caggactccctctaagtgga

SEQ ID NO: 4309 - DNA, 20 bp, Homo Sapiens
aggactccctctaagtggaa

SEQ ID NO: 4310 - DNA, 20 bp, Homo Sapiens
ggactccctctaagtggaat

SEQ ID NO: 4311 - DNA, 20 bp, Homo Sapiens
gactccctctaagtggaata

SEQ ID NO: 4312 - DNA, 20 bp, Homo Sapiens
actccctctaagtggaatag

SEQ ID NO: 4313 - DNA, 20 bp, Homo Sapiens
ctccctctaagtggaatagc

SEQ ID NO: 4314 - DNA, 20 bp, Homo Sapiens
tccctctaagtggaatagcc

SEQ ID NO: 4315 - DNA, 20 bp, Homo Sapiens
ccctctaagtggaatagcct

SEQ ID NO: 4316 - DNA, 20 bp, Homo Sapiens
cctctaagtggaatagcctc

SEQ ID NO: 4317 - DNA, 20 bp, Homo Sapiens
ctctaagtggaatagcctcc

SEQ ID NO: 4318 - DNA, 20 bp, Homo Sapiens
tctaagtggaatagcctccc

SEQ ID NO: 4319 - DNA, 20 bp, Homo Sapiens
ctaagtggaatagcctccct

SEQ ID NO: 4320 - DNA, 20 bp, Homo Sapiens
taagtggaatagcctccctg

SEQ ID NO: 4321 - DNA, 20 bp, Homo Sapiens
aagtggaatagcctccctgt

SEQ ID NO: 4322 - DNA, 20 bp, Homo Sapiens
agtggaatagcctccctgta

SEQ ID NO: 4323 - DNA, 20 bp, Homo Sapiens
gtggaatagcctccctgtaa

SEQ ID NO: 4324 - DNA, 20 bp, Homo Sapiens
tggaatagcctccctgtaac

SEQ ID NO: 4325 - DNA, 20 bp, Homo Sapiens
ggaatagcctccctgtaact

SEQ ID NO: 4326 - DNA, 20 bp, Homo Sapiens
gaatagcctccctgtaactc

SEQ ID NO: 4327 - DNA, 20 bp, Homo Sapiens
aatagcctccctgtaactcc

SEQ ID NO: 4328 - DNA, 20 bp, Homo Sapiens
atagcctccctgtaactcca

SEQ ID NO: 4329 - DNA, 20 bp, Homo Sapiens
tagcctccctgtaactccag

SEQ ID NO: 4330 - DNA, 20 bp, Homo Sapiens
agcctccctgtaactccagc

SEQ ID NO: 4331 - DNA, 20 bp, Homo Sapiens
gcctccctgtaactccagct

SEQ ID NO: 4332 - DNA, 20 bp, Homo Sapiens
cctccctgtaactccagctc

SEQ ID NO: 4333 - DNA, 20 bp, Homo Sapiens
ctccctgtaactccagctct

SEQ ID NO: 4334 - DNA, 20 bp, Homo Sapiens
tccctgtaactccagctctg

SEQ ID NO: 4335 - DNA, 20 bp, Homo Sapiens
ccctgtaactccagctctgc

SEQ ID NO: 4336 - DNA, 20 bp, Homo Sapiens
cctgtaactccagctctgct

SEQ ID NO: 4337 - DNA, 20 bp, Homo Sapiens
ctgtaactccagctctgctc

SEQ ID NO: 4338 - DNA, 20 bp, Homo Sapiens
tgtaactccagctctgctcc

SEQ ID NO: 4339 - DNA, 20 bp, Homo Sapiens
gtaactccagctctgctccg

SEQ ID NO: 4340 - DNA, 20 bp, Homo Sapiens
taactccagctctgctccgt

SEQ ID NO: 4341 - DNA, 20 bp, Homo Sapiens
aactccagctctgctccgta

SEQ ID NO: 4342 - DNA, 20 bp, Homo Sapiens
actccagctctgctccgtat

SEQ ID NO: 4343 - DNA, 20 bp, Homo Sapiens
ctccagctctgctccgtatg

SEQ ID NO: 4344 - DNA, 20 bp, Homo Sapiens
tccagctctgctccgtatgc

SEQ ID NO: 4345 - DNA, 20 bp, Homo Sapiens
ccagctctgctccgtatgcc

SEQ ID NO: 4346 - DNA, 20 bp, Homo Sapiens
cagctctgctccgtatgcca

SEQ ID NO: 4347 - DNA, 20 bp, Homo Sapiens
agctctgctccgtatgccaa

SEQ ID NO: 4348 - DNA, 20 bp, Homo Sapiens
gctctgctccgtatgccaag

SEQ ID NO: 4349 - DNA, 20 bp, Homo Sapiens
ctctgctccgtatgccaaga

SEQ ID NO: 4350 - DNA, 20 bp, Homo Sapiens
tctgctccgtatgccaagag

SEQ ID NO: 4351 - DNA, 20 bp, Homo Sapiens
ctgctccgtatgccaagagg

SEQ ID NO: 4352 - DNA, 20 bp, Homo Sapiens
tgctccgtatgccaagagga

SEQ ID NO: 4353 - DNA, 20 bp, Homo Sapiens
gctccgtatgccaagaggag

SEQ ID NO: 4354 - DNA, 20 bp, Homo Sapiens
ctccgtatgccaagaggaga

SEQ ID NO: 4355 - DNA, 20 bp, Homo Sapiens
tccgtatgccaagaggagac

SEQ ID NO: 4356 - DNA, 20 bp, Homo Sapiens
ccgtatgccaagaggagact

SEQ ID NO: 4357 - DNA, 20 bp, Homo Sapiens
cgtatgccaagaggagactt

SEQ ID NO: 4358 - DNA, 20 bp, Homo Sapiens
gtatgccaagaggagacttt

SEQ ID NO: 4359 - DNA, 20 bp, Homo Sapiens
tatgccaagaggagacttta

SEQ ID NO: 4360 - DNA, 20 bp, Homo Sapiens
atgccaagaggagactttaa

SEQ ID NO: 4361 - DNA, 20 bp, Homo Sapiens
tgccaagaggagactttaat

SEQ ID NO: 4362 - DNA, 20 bp, Homo Sapiens
gccaagaggagactttaatt

SEQ ID NO: 4363 - DNA, 20 bp, Homo Sapiens
ccaagaggagactttaattc

SEQ ID NO: 4364 - DNA, 20 bp, Homo Sapiens
caagaggagactttaattct

SEQ ID NO: 4365 - DNA, 20 bp, Homo Sapiens
aagaggagactttaattctc

SEQ ID NO: 4366 - DNA, 20 bp, Homo Sapiens
agaggagactttaattctct

SEQ ID NO: 4367 - DNA, 20 bp, Homo Sapiens
gaggagactttaattctctt

SEQ ID NO: 4368 - DNA, 20 bp, Homo Sapiens
aggagactttaattctctta

SEQ ID NO: 4369 - DNA, 20 bp, Homo Sapiens
ggagactttaattctcttac

SEQ ID NO: 4370 - DNA, 20 bp, Homo Sapiens
gagactttaattctcttact

SEQ ID NO: 4371 - DNA, 20 bp, Homo Sapiens
agactttaattctcttactg

SEQ ID NO: 4372 - DNA, 20 bp, Homo Sapiens
gactttaattctcttactgc

SEQ ID NO: 4373 - DNA, 20 bp, Homo Sapiens
actttaattctcttactgct

SEQ ID NO: 4374 - DNA, 20 bp, Homo Sapiens
ctttaattctcttactgctt

SEQ ID NO: 4375 - DNA, 20 bp, Homo Sapiens
tttaattctcttactgcttc

SEQ ID NO: 4376 - DNA, 20 bp, Homo Sapiens
ttaattctcttactgcttct

SEQ ID NO: 4377 - DNA, 20 bp, Homo Sapiens
taattctcttactgcttctt

SEQ ID NO: 4378 - DNA, 20 bp, Homo Sapiens
aattctcttactgcttcttt

SEQ ID NO: 4379 - DNA, 20 bp, Homo Sapiens
attctcttactgcttctttt

SEQ ID NO: 4380 - DNA, 20 bp, Homo Sapiens
ttctcttactgcttcttttc

SEQ ID NO: 4381 - DNA, 20 bp, Homo Sapiens
tctcttactgcttcttttca

SEQ ID NO: 4382 - DNA, 20 bp, Homo Sapiens
ctcttactgcttcttttcac

SEQ ID NO: 4383 - DNA, 20 bp, Homo Sapiens
tcttactgcttcttttcact

SEQ ID NO: 4384 - DNA, 20 bp, Homo Sapiens
cttactgcttcttttcactt

SEQ ID NO: 4385 - DNA, 20 bp, Homo Sapiens
ttactgcttcttttcacttc

SEQ ID NO: 4386 - DNA, 20 bp, Homo Sapiens
tactgcttcttttcacttca

SEQ ID NO: 4387 - DNA, 20 bp, Homo Sapiens
actgcttcttttcacttcag

SEQ ID NO: 4388 - DNA, 20 bp, Homo Sapiens
ctgcttcttttcacttcaga

SEQ ID NO: 4389 - DNA, 20 bp, Homo Sapiens
tgcttcttttcacttcagag

SEQ ID NO: 4390 - DNA, 20 bp, Homo Sapiens
gcttcttttcacttcagagc

SEQ ID NO: 4391 - DNA, 20 bp, Homo Sapiens
cttcttttcacttcagagca

SEQ ID NO: 4392 - DNA, 20 bp, Homo Sapiens
ttcttttcacttcagagcac

SEQ ID NO: 4393 - DNA, 20 bp, Homo Sapiens
tcttttcacttcagagcaca

SEQ ID NO: 4394 - DNA, 20 bp, Homo Sapiens
cttttcacttcagagcacac

SEQ ID NO: 4395 - DNA, 20 bp, Homo Sapiens
ttttcacttcagagcacact

SEQ ID NO: 4396 - DNA, 20 bp, Homo Sapiens
tttcacttcagagcacactt

SEQ ID NO: 4397 - DNA, 20 bp, Homo Sapiens
ttcacttcagagcacactta

SEQ ID NO: 4398 - DNA, 20 bp, Homo Sapiens
tcacttcagagcacacttat

SEQ ID NO: 4399 - DNA, 20 bp, Homo Sapiens
cacttcagagcacacttatg

SEQ ID NO: 4400 - DNA, 20 bp, Homo Sapiens
acttcagagcacacttatgg

SEQ ID NO: 4401 - DNA, 20 bp, Homo Sapiens
cttcagagcacacttatggg

SEQ ID NO: 4402 - DNA, 20 bp, Homo Sapiens
ttcagagcacacttatgggc

SEQ ID NO: 4403 - DNA, 20 bp, Homo Sapiens
tcagagcacacttatgggcc

SEQ ID NO: 4404 - DNA, 20 bp, Homo Sapiens
cagagcacacttatgggcca

SEQ ID NO: 4405 - DNA, 20 bp, Homo Sapiens
agagcacacttatgggccaa

SEQ ID NO: 4406 - DNA, 20 bp, Homo Sapiens
gagcacacttatgggccaag

SEQ ID NO: 4407 - DNA, 20 bp, Homo Sapiens
agcacacttatgggccaagc

SEQ ID NO: 4408 - DNA, 20 bp, Homo Sapiens
gcacacttatgggccaagcc

SEQ ID NO: 4409 - DNA, 20 bp, Homo Sapiens
cacacttatgggccaagccc

SEQ ID NO: 4410 - DNA, 20 bp, Homo Sapiens
acacttatgggccaagccca

SEQ ID NO: 4411 - DNA, 20 bp, Homo Sapiens
cacttatgggccaagcccag

SEQ ID NO: 4412 - DNA, 20 bp, Homo Sapiens
acttatgggccaagcccagc

SEQ ID NO: 4413 - DNA, 20 bp, Homo Sapiens
cttatgggccaagcccagct

SEQ ID NO: 4414 - DNA, 20 bp, Homo Sapiens
ttatgggccaagcccagctt

SEQ ID NO: 4415 - DNA, 20 bp, Homo Sapiens
tatgggccaagcccagctta

SEQ ID NO: 4416 - DNA, 20 bp, Homo Sapiens
atgggccaagcccagcttaa

SEQ ID NO: 4417 - DNA, 20 bp, Homo Sapiens
tgggccaagcccagcttaat

SEQ ID NO: 4418 - DNA, 20 bp, Homo Sapiens
gggccaagcccagcttaatg

SEQ ID NO: 4419 - DNA, 20 bp, Homo Sapiens
ggccaagcccagcttaatgg

SEQ ID NO: 4420 - DNA, 20 bp, Homo Sapiens
gccaagcccagcttaatggc

SEQ ID NO: 4421 - DNA, 20 bp, Homo Sapiens
ccaagcccagcttaatggct

SEQ ID NO: 4422 - DNA, 20 bp, Homo Sapiens
caagcccagcttaatggctc

SEQ ID NO: 4423 - DNA, 20 bp, Homo Sapiens
aagcccagcttaatggctca

SEQ ID NO: 4424 - DNA, 20 bp, Homo Sapiens
agcccagcttaatggctcat

SEQ ID NO: 4425 - DNA, 20 bp, Homo Sapiens
gcccagcttaatggctcatg

SEQ ID NO: 4426 - DNA, 20 bp, Homo Sapiens
cccagcttaatggctcatga

SEQ ID NO: 4427 - DNA, 20 bp, Homo Sapiens
ccagcttaatggctcatgac

SEQ ID NO: 4428 - DNA, 20 bp, Homo Sapiens
cagcttaatggctcatgacc

SEQ ID NO: 4429 - DNA, 20 bp, Homo Sapiens
agcttaatggctcatgacct

SEQ ID NO: 4430 - DNA, 20 bp, Homo Sapiens
gcttaatggctcatgacctg

SEQ ID NO: 4431 - DNA, 20 bp, Homo Sapiens
cttaatggctcatgacctgg

SEQ ID NO: 4432 - DNA, 20 bp, Homo Sapiens
ttaatggctcatgacctgga

SEQ ID NO: 4433 - DNA, 20 bp, Homo Sapiens
taatggctcatgacctggaa

SEQ ID NO: 4434 - DNA, 20 bp, Homo Sapiens
aatggctcatgacctggaaa

SEQ ID NO: 4435 - DNA, 20 bp, Homo Sapiens
atggctcatgacctggaaat

SEQ ID NO: 4436 - DNA, 20 bp, Homo Sapiens
tggctcatgacctggaaata

SEQ ID NO: 4437 - DNA, 20 bp, Homo Sapiens
ggctcatgacctggaaataa

SEQ ID NO: 4438 - DNA, 20 bp, Homo Sapiens
gctcatgacctggaaataaa

SEQ ID NO: 4439 - DNA, 20 bp, Homo Sapiens
ctcatgacctggaaataaaa

SEQ ID NO: 4440 - DNA, 20 bp, Homo Sapiens
tcatgacctggaaataaaat

SEQ ID NO: 4441 - DNA, 20 bp, Homo Sapiens
catgacctggaaataaaatt

SEQ ID NO: 4442 - DNA, 20 bp, Homo Sapiens
atgacctggaaataaaattt

SEQ ID NO: 4443 - DNA, 20 bp, Homo Sapiens
tgacctggaaataaaattta

SEQ ID NO: 4444 - DNA, 20 bp, Homo Sapiens
gacctggaaataaaatttag

SEQ ID NO: 4445 - DNA, 20 bp, Homo Sapiens
acctggaaataaaatttagg

SEQ ID NO: 4446 - DNA, 20 bp, Homo Sapiens
cctggaaataaaatttagga

SEQ ID NO: 4447 - DNA, 20 bp, Homo Sapiens
ctggaaataaaatttaggac

SEQ ID NO: 4448 - DNA, 20 bp, Homo Sapiens
tggaaataaaatttaggacc

SEQ ID NO: 4449 - DNA, 20 bp, Homo Sapiens
ggaaataaaatttaggacca

SEQ ID NO: 4450 - DNA, 20 bp, Homo Sapiens
gaaataaaatttaggaccaa

SEQ ID NO: 4451 - DNA, 20 bp, Homo Sapiens
aaataaaatttaggaccaat

SEQ ID NO: 4452 - DNA, 20 bp, Homo Sapiens
aataaaatttaggaccaata

SEQ ID NO: 4453 - DNA, 20 bp, Homo Sapiens
ataaaatttaggaccaatac

SEQ ID NO: 4454 - DNA, 20 bp, Homo Sapiens
taaaatttaggaccaatacc

SEQ ID NO: 4455 - DNA, 20 bp, Homo Sapiens
aaaatttaggaccaatacct

SEQ ID NO: 4456 - DNA, 20 bp, Homo Sapiens
aaatttaggaccaatacctc

SEQ ID NO: 4457 - DNA, 20 bp, Homo Sapiens
aatttaggaccaatacctcc

SEQ ID NO: 4458 - DNA, 20 bp, Homo Sapiens
atttaggaccaatacctcct

SEQ ID NO: 4459 - DNA, 20 bp, Homo Sapiens
tttaggaccaatacctcctc

SEQ ID NO: 4460 - DNA, 20 bp, Homo Sapiens
ttaggaccaatacctcctcc

SEQ ID NO: 4461 - DNA, 20 bp, Homo Sapiens
taggaccaatacctcctcca

SEQ ID NO: 4462 - DNA, 20 bp, Homo Sapiens
aggaccaatacctcctccag

SEQ ID NO: 4463 - DNA, 20 bp, Homo Sapiens
ggaccaatacctcctccaga

SEQ ID NO: 4464 - DNA, 20 bp, Homo Sapiens
gaccaatacctcctccagat

SEQ ID NO: 4465 - DNA, 20 bp, Homo Sapiens
accaatacctcctccagatc

SEQ ID NO: 4466 - DNA, 20 bp, Homo Sapiens
ccaatacctcctccagatca

SEQ ID NO: 4467 - DNA, 20 bp, Homo Sapiens
caatacctcctccagatcag

SEQ ID NO: 4468 - DNA, 20 bp, Homo Sapiens
aatacctcctccagatcaga

SEQ ID NO: 4469 - DNA, 20 bp, Homo Sapiens
atacctcctccagatcagat

SEQ ID NO: 4470 - DNA, 20 bp, Homo Sapiens
tacctcctccagatcagatt

SEQ ID NO: 4471 - DNA, 20 bp, Homo Sapiens
acctcctccagatcagattc

SEQ ID NO: 4472 - DNA, 20 bp, Homo Sapiens
cctcctccagatcagattct

SEQ ID NO: 4473 - DNA, 20 bp, Homo Sapiens
ctcctccagatcagattctt

SEQ ID NO: 4474 - DNA, 20 bp, Homo Sapiens
tcctccagatcagattcttc

SEQ ID NO: 4475 - DNA, 20 bp, Homo Sapiens
cctccagatcagattcttct

SEQ ID NO: 4476 - DNA, 20 bp, Homo Sapiens
ctccagatcagattcttctc

SEQ ID NO: 4477 - DNA, 20 bp, Homo Sapiens
tccagatcagattcttctct

SEQ ID NO: 4478 - DNA, 20 bp, Homo Sapiens
ccagatcagattcttctctt

SEQ ID NO: 4479 - DNA, 20 bp, Homo Sapiens
cagatcagattcttctctta

SEQ ID NO: 4480 - DNA, 20 bp, Homo Sapiens
agatcagattcttctcttaa

SEQ ID NO: 4481 - DNA, 20 bp, Homo Sapiens
gatcagattcttctcttaat

SEQ ID NO: 4482 - DNA, 20 bp, Homo Sapiens
atcagattcttctcttaatt

SEQ ID NO: 4483 - DNA, 20 bp, Homo Sapiens
tcagattcttctcttaattt

SEQ ID NO: 4484 - DNA, 20 bp, Homo Sapiens
cagattcttctcttaatttc

SEQ ID NO: 4485 - DNA, 20 bp, Homo Sapiens
agattcttctcttaatttca

SEQ ID NO: 4486 - DNA, 20 bp, Homo Sapiens
gattcttctcttaatttcat

SEQ ID NO: 4487 - DNA, 20 bp, Homo Sapiens
attcttctcttaatttcata

SEQ ID NO: 4488 - DNA, 20 bp, Homo Sapiens
ttcttctcttaatttcatag

SEQ ID NO: 4489 - DNA, 20 bp, Homo Sapiens
tcttctcttaatttcataga

SEQ ID NO: 4490 - DNA, 20 bp, Homo Sapiens
cttctcttaatttcatagat

SEQ ID NO: 4491 - DNA, 20 bp, Homo Sapiens
ttctcttaatttcatagatt

SEQ ID NO: 4492 - DNA, 20 bp, Homo Sapiens
tctcttaatttcatagattg

SEQ ID NO: 4493 - DNA, 20 bp, Homo Sapiens
ctcttaatttcatagattgt

SEQ ID NO: 4494 - DNA, 20 bp, Homo Sapiens
tcttaatttcatagattgtg

SEQ ID NO: 4495 - DNA, 20 bp, Homo Sapiens
cttaatttcatagattgtgt

SEQ ID NO: 4496 - DNA, 20 bp, Homo Sapiens
ttaatttcatagattgtgtt

SEQ ID NO: 4497 - DNA, 20 bp, Homo Sapiens
taatttcatagattgtgttt

SEQ ID NO: 4498 - DNA, 20 bp, Homo Sapiens
aatttcatagattgtgtttt

SEQ ID NO: 4499 - DNA, 20 bp, Homo Sapiens
atttcatagattgtgttttt

SEQ ID NO: 4500 - DNA, 20 bp, Homo Sapiens
tttcatagattgtgtttttt

SEQ ID NO: 4501 - DNA, 20 bp, Homo Sapiens
ttcatagattgtgttttttt

SEQ ID NO: 4502 - DNA, 20 bp, Homo Sapiens
tcatagattgtgtttttttt

SEQ ID NO: 4503 - DNA, 20 bp, Homo Sapiens
catagattgtgttttttttt

SEQ ID NO: 4504 - DNA, 20 bp, Homo Sapiens
atagattgtgtttttttttt

SEQ ID NO: 4505 - DNA, 20 bp, Homo Sapiens
tagattgtgtttttttttta

SEQ ID NO: 4506 - DNA, 20 bp, Homo Sapiens
agattgtgttttttttttaa

SEQ ID NO: 4507 - DNA, 20 bp, Homo Sapiens
gattgtgttttttttttaaa

SEQ ID NO: 4508 - DNA, 20 bp, Homo Sapiens
attgtgttttttttttaaat

SEQ ID NO: 4509 - DNA, 20 bp, Homo Sapiens
ttgtgttttttttttaaata

SEQ ID NO: 4510 - DNA, 20 bp, Homo Sapiens
tgtgttttttttttaaatag

SEQ ID NO: 4511 - DNA, 20 bp, Homo Sapiens
gtgttttttttttaaataga

SEQ ID NO: 4512 - DNA, 20 bp, Homo Sapiens
tgttttttttttaaatagac

SEQ ID NO: 4513 - DNA, 20 bp, Homo Sapiens
gttttttttttaaatagacc

SEQ ID NO: 4514 - DNA, 20 bp, Homo Sapiens
ttttttttttaaatagacct

SEQ ID NO: 4515 - DNA, 20 bp, Homo Sapiens
tttttttttaaatagacctc

SEQ ID NO: 4516 - DNA, 20 bp, Homo Sapiens
ttttttttaaatagacctct

SEQ ID NO: 4517 - DNA, 20 bp, Homo Sapiens
tttttttaaatagacctctc

SEQ ID NO: 4518 - DNA, 20 bp, Homo Sapiens
ttttttaaatagacctctca

SEQ ID NO: 4519 - DNA, 20 bp, Homo Sapiens
tttttaaatagacctctcaa

SEQ ID NO: 4520 - DNA, 20 bp, Homo Sapiens
ttttaaatagacctctcaat

SEQ ID NO: 4521 - DNA, 20 bp, Homo Sapiens
tttaaatagacctctcaatt

SEQ ID NO: 4522 - DNA, 20 bp, Homo Sapiens
ttaaatagacctctcaattt

SEQ ID NO: 4523 - DNA, 20 bp, Homo Sapiens
taaatagacctctcaatttc

SEQ ID NO: 4524 - DNA, 20 bp, Homo Sapiens
aaatagacctctcaatttct

SEQ ID NO: 4525 - DNA, 20 bp, Homo Sapiens
aatagacctctcaatttctg

SEQ ID NO: 4526 - DNA, 20 bp, Homo Sapiens
atagacctctcaatttctgg

SEQ ID NO: 4527 - DNA, 20 bp, Homo Sapiens
tagacctctcaatttctgga

SEQ ID NO: 4528 - DNA, 20 bp, Homo Sapiens
agacctctcaatttctggaa

SEQ ID NO: 4529 - DNA, 20 bp, Homo Sapiens
gacctctcaatttctggaaa

SEQ ID NO: 4530 - DNA, 20 bp, Homo Sapiens
acctctcaatttctggaaaa

SEQ ID NO: 4531 - DNA, 20 bp, Homo Sapiens
cctctcaatttctggaaaac

SEQ ID NO: 4532 - DNA, 20 bp, Homo Sapiens
ctctcaatttctggaaaact

SEQ ID NO: 4533 - DNA, 20 bp, Homo Sapiens
tctcaatttctggaaaactg

SEQ ID NO: 4534 - DNA, 20 bp, Homo Sapiens
ctcaatttctggaaaactgc

SEQ ID NO: 4535 - DNA, 20 bp, Homo Sapiens
tcaatttctggaaaactgcc

SEQ ID NO: 4536 - DNA, 20 bp, Homo Sapiens
caatttctggaaaactgcct

SEQ ID NO: 4537 - DNA, 20 bp, Homo Sapiens
aatttctggaaaactgcctt

SEQ ID NO: 4538 - DNA, 20 bp, Homo Sapiens
atttctggaaaactgccttt

SEQ ID NO: 4539 - DNA, 20 bp, Homo Sapiens
tttctggaaaactgcctttt

SEQ ID NO: 4540 - DNA, 20 bp, Homo Sapiens
ttctggaaaactgcctttta

SEQ ID NO: 4541 - DNA, 20 bp, Homo Sapiens
tctggaaaactgccttttat

SEQ ID NO: 4542 - DNA, 20 bp, Homo Sapiens
ctggaaaactgccttttatc

SEQ ID NO: 4543 - DNA, 20 bp, Homo Sapiens
tggaaaactgccttttatct

SEQ ID NO: 4544 - DNA, 20 bp, Homo Sapiens
ggaaaactgccttttatctg

SEQ ID NO: 4545 - DNA, 20 bp, Homo Sapiens
gaaaactgccttttatctgc

SEQ ID NO: 4546 - DNA, 20 bp, Homo Sapiens
aaaactgccttttatctgcc

SEQ ID NO: 4547 - DNA, 20 bp, Homo Sapiens
aaactgccttttatctgccc

SEQ ID NO: 4548 - DNA, 20 bp, Homo Sapiens
aactgccttttatctgccca

SEQ ID NO: 4549 - DNA, 20 bp, Homo Sapiens
actgccttttatctgcccag

SEQ ID NO: 4550 - DNA, 20 bp, Homo Sapiens
ctgccttttatctgcccaga

SEQ ID NO: 4551 - DNA, 20 bp, Homo Sapiens
tgccttttatctgcccagaa

SEQ ID NO: 4552 - DNA, 20 bp, Homo Sapiens
gccttttatctgcccagaat

SEQ ID NO: 4553 - DNA, 20 bp, Homo Sapiens
ccttttatctgcccagaatt

SEQ ID NO: 4554 - DNA, 20 bp, Homo Sapiens
cttttatctgcccagaattc

SEQ ID NO: 4555 - DNA, 20 bp, Homo Sapiens
ttttatctgcccagaattct

SEQ ID NO: 4556 - DNA, 20 bp, Homo Sapiens
tttatctgcccagaattcta

SEQ ID NO: 4557 - DNA, 20 bp, Homo Sapiens
ttatctgcccagaattctaa

SEQ ID NO: 4558 - DNA, 20 bp, Homo Sapiens
tatctgcccagaattctaag

SEQ ID NO: 4559 - DNA, 20 bp, Homo Sapiens
atctgcccagaattctaagc

SEQ ID NO: 4560 - DNA, 20 bp, Homo Sapiens
tctgcccagaattctaagct

SEQ ID NO: 4561 - DNA, 20 bp, Homo Sapiens
ctgcccagaattctaagctg

SEQ ID NO: 4562 - DNA, 20 bp, Homo Sapiens
tgcccagaattctaagctgg

SEQ ID NO: 4563 - DNA, 20 bp, Homo Sapiens
gcccagaattctaagctggt

SEQ ID NO: 4564 - DNA, 20 bp, Homo Sapiens
cccagaattctaagctggtg

SEQ ID NO: 4565 - DNA, 20 bp, Homo Sapiens
ccagaattctaagctggtgc

SEQ ID NO: 4566 - DNA, 20 bp, Homo Sapiens
cagaattctaagctggtgcc

SEQ ID NO: 4567 - DNA, 20 bp, Homo Sapiens
agaattctaagctggtgccc

SEQ ID NO: 4568 - DNA, 20 bp, Homo Sapiens
gaattctaagctggtgcccc

SEQ ID NO: 4569 - DNA, 20 bp, Homo Sapiens
aattctaagctggtgcccca

SEQ ID NO: 4570 - DNA, 20 bp, Homo Sapiens
attctaagctggtgccccac

SEQ ID NO: 4571 - DNA, 20 bp, Homo Sapiens
ttctaagctggtgccccact

SEQ ID NO: 4572 - DNA, 20 bp, Homo Sapiens
tctaagctggtgccccactg

SEQ ID NO: 4573 - DNA, 20 bp, Homo Sapiens
ctaagctggtgccccactga

SEQ ID NO: 4574 - DNA, 20 bp, Homo Sapiens
taagctggtgccccactgaa

SEQ ID NO: 4575 - DNA, 20 bp, Homo Sapiens
aagctggtgccccactgaat

SEQ ID NO: 4576 - DNA, 20 bp, Homo Sapiens
agctggtgccccactgaatt

SEQ ID NO: 4577 - DNA, 20 bp, Homo Sapiens
gctggtgccccactgaattt

SEQ ID NO: 4578 - DNA, 20 bp, Homo Sapiens
ctggtgccccactgaatttt

SEQ ID NO: 4579 - DNA, 20 bp, Homo Sapiens
tggtgccccactgaattttg

SEQ ID NO: 4580 - DNA, 20 bp, Homo Sapiens
ggtgccccactgaattttgt

SEQ ID NO: 4581 - DNA, 20 bp, Homo Sapiens
gtgccccactgaattttgtg

SEQ ID NO: 4582 - DNA, 20 bp, Homo Sapiens
tgccccactgaattttgtgt

SEQ ID NO: 4583 - DNA, 20 bp, Homo Sapiens
gccccactgaattttgtgta

SEQ ID NO: 4584 - DNA, 20 bp, Homo Sapiens
ccccactgaattttgtgtac

SEQ ID NO: 4585 - DNA, 20 bp, Homo Sapiens
cccactgaattttgtgtacc

SEQ ID NO: 4586 - DNA, 20 bp, Homo Sapiens
ccactgaattttgtgtacct

SEQ ID NO: 4587 - DNA, 20 bp, Homo Sapiens
cactgaattttgtgtacctg

SEQ ID NO: 4588 - DNA, 20 bp, Homo Sapiens
actgaattttgtgtacctgt

SEQ ID NO: 4589 - DNA, 20 bp, Homo Sapiens
ctgaattttgtgtacctgtg

SEQ ID NO: 4590 - DNA, 20 bp, Homo Sapiens
tgaattttgtgtacctgtga

SEQ ID NO: 4591 - DNA, 20 bp, Homo Sapiens
gaattttgtgtacctgtgac

SEQ ID NO: 4592 - DNA, 20 bp, Homo Sapiens
aattttgtgtacctgtgact

SEQ ID NO: 4593 - DNA, 20 bp, Homo Sapiens
attttgtgtacctgtgacta

SEQ ID NO: 4594 - DNA, 20 bp, Homo Sapiens
ttttgtgtacctgtgactaa

SEQ ID NO: 4595 - DNA, 20 bp, Homo Sapiens
tttgtgtacctgtgactaaa

SEQ ID NO: 4596 - DNA, 20 bp, Homo Sapiens
ttgtgtacctgtgactaaac

SEQ ID NO: 4597 - DNA, 20 bp, Homo Sapiens
tgtgtacctgtgactaaaca

SEQ ID NO: 4598 - DNA, 20 bp, Homo Sapiens
gtgtacctgtgactaaacaa

SEQ ID NO: 4599 - DNA, 20 bp, Homo Sapiens
tgtacctgtgactaaacaac

SEQ ID NO: 4600 - DNA, 20 bp, Homo Sapiens
gtacctgtgactaaacaact

SEQ ID NO: 4601 - DNA, 20 bp, Homo Sapiens
tacctgtgactaaacaacta

SEQ ID NO: 4602 - DNA, 20 bp, Homo Sapiens
acctgtgactaaacaactac

SEQ ID NO: 4603 - DNA, 20 bp, Homo Sapiens
cctgtgactaaacaactacc

SEQ ID NO: 4604 - DNA, 20 bp, Homo Sapiens
ctgtgactaaacaactacct

SEQ ID NO: 4605 - DNA, 20 bp, Homo Sapiens
tgtgactaaacaactacctc

SEQ ID NO: 4606 - DNA, 20 bp, Homo Sapiens
gtgactaaacaactacctcc

SEQ ID NO: 4607 - DNA, 20 bp, Homo Sapiens
tgactaaacaactacctcct

SEQ ID NO: 4608 - DNA, 20 bp, Homo Sapiens
gactaaacaactacctcctc

SEQ ID NO: 4609 - DNA, 20 bp, Homo Sapiens
actaaacaactacctcctca

SEQ ID NO: 4610 - DNA, 20 bp, Homo Sapiens
ctaaacaactacctcctcag

SEQ ID NO: 4611 - DNA, 20 bp, Homo Sapiens
taaacaactacctcctcagt

SEQ ID NO: 4612 - DNA, 20 bp, Homo Sapiens
aaacaactacctcctcagtc

SEQ ID NO: 4613 - DNA, 20 bp, Homo Sapiens
aacaactacctcctcagtct

SEQ ID NO: 4614 - DNA, 20 bp, Homo Sapiens
acaactacctcctcagtctg

SEQ ID NO: 4615 - DNA, 20 bp, Homo Sapiens
caactacctcctcagtctgg

SEQ ID NO: 4616 - DNA, 20 bp, Homo Sapiens
aactacctcctcagtctggg

SEQ ID NO: 4617 - DNA, 20 bp, Homo Sapiens
actacctcctcagtctgggt

SEQ ID NO: 4618 - DNA, 20 bp, Homo Sapiens
ctacctcctcagtctgggtg

SEQ ID NO: 4619 - DNA, 20 bp, Homo Sapiens
tacctcctcagtctgggtgg

SEQ ID NO: 4620 - DNA, 20 bp, Homo Sapiens
acctcctcagtctgggtggg

SEQ ID NO: 4621 - DNA, 20 bp, Homo Sapiens
cctcctcagtctgggtggga

SEQ ID NO: 4622 - DNA, 20 bp, Homo Sapiens
ctcctcagtctgggtgggac

SEQ ID NO: 4623 - DNA, 20 bp, Homo Sapiens
tcctcagtctgggtgggact

SEQ ID NO: 4624 - DNA, 20 bp, Homo Sapiens
cctcagtctgggtgggactt

SEQ ID NO: 4625 - DNA, 20 bp, Homo Sapiens
ctcagtctgggtgggactta

SEQ ID NO: 4626 - DNA, 20 bp, Homo Sapiens
tcagtctgggtgggacttat

SEQ ID NO: 4627 - DNA, 20 bp, Homo Sapiens
cagtctgggtgggacttatg

SEQ ID NO: 4628 - DNA, 20 bp, Homo Sapiens
agtctgggtgggacttatgt

SEQ ID NO: 4629 - DNA, 20 bp, Homo Sapiens
gtctgggtgggacttatgta

SEQ ID NO: 4630 - DNA, 20 bp, Homo Sapiens
tctgggtgggacttatgtat

SEQ ID NO: 4631 - DNA, 20 bp, Homo Sapiens
ctgggtgggacttatgtatt

SEQ ID NO: 4632 - DNA, 20 bp, Homo Sapiens
tgggtgggacttatgtattt

SEQ ID NO: 4633 - DNA, 20 bp, Homo Sapiens
gggtgggacttatgtattta

SEQ ID NO: 4634 - DNA, 20 bp, Homo Sapiens
ggtgggacttatgtatttat

SEQ ID NO: 4635 - DNA, 20 bp, Homo Sapiens
gtgggacttatgtatttatg

SEQ ID NO: 4636 - DNA, 20 bp, Homo Sapiens
tgggacttatgtatttatga

SEQ ID NO: 4637 - DNA, 20 bp, Homo Sapiens
gggacttatgtatttatgac

SEQ ID NO: 4638 - DNA, 20 bp, Homo Sapiens
ggacttatgtatttatgacc

SEQ ID NO: 4639 - DNA, 20 bp, Homo Sapiens
gacttatgtatttatgacct

SEQ ID NO: 4640 - DNA, 20 bp, Homo Sapiens
acttatgtatttatgacctt

SEQ ID NO: 4641 - DNA, 20 bp, Homo Sapiens
cttatgtatttatgacctta

SEQ ID NO: 4642 - DNA, 20 bp, Homo Sapiens
ttatgtatttatgaccttat

SEQ ID NO: 4643 - DNA, 20 bp, Homo Sapiens
tatgtatttatgaccttata

SEQ ID NO: 4644 - DNA, 20 bp, Homo Sapiens
atgtatttatgaccttatag

SEQ ID NO: 4645 - DNA, 20 bp, Homo Sapiens
tgtatttatgaccttatagt

SEQ ID NO: 4646 - DNA, 20 bp, Homo Sapiens
gtatttatgaccttatagtg

SEQ ID NO: 4647 - DNA, 20 bp, Homo Sapiens
tatttatgaccttatagtgt

SEQ ID NO: 4648 - DNA, 20 bp, Homo Sapiens
atttatgaccttatagtgtt

SEQ ID NO: 4649 - DNA, 20 bp, Homo Sapiens
tttatgaccttatagtgtta

SEQ ID NO: 4650 - DNA, 20 bp, Homo Sapiens
ttatgaccttatagtgttaa

SEQ ID NO: 4651 - DNA, 20 bp, Homo Sapiens
tatgaccttatagtgttaat

SEQ ID NO: 4652 - DNA, 20 bp, Homo Sapiens
atgaccttatagtgttaata

SEQ ID NO: 4653 - DNA, 20 bp, Homo Sapiens
tgaccttatagtgttaatat

SEQ ID NO: 4654 - DNA, 20 bp, Homo Sapiens
gaccttatagtgttaatatc

SEQ ID NO: 4655 - DNA, 20 bp, Homo Sapiens
accttatagtgttaatatct

SEQ ID NO: 4656 - DNA, 20 bp, Homo Sapiens
ccttatagtgttaatatctt

SEQ ID NO: 4657 - DNA, 20 bp, Homo Sapiens
cttatagtgttaatatcttg

SEQ ID NO: 4658 - DNA, 20 bp, Homo Sapiens
ttatagtgttaatatcttga

SEQ ID NO: 4659 - DNA, 20 bp, Homo Sapiens
tatagtgttaatatcttgaa

SEQ ID NO: 4660 - DNA, 20 bp, Homo Sapiens
atagtgttaatatcttgaaa

SEQ ID NO: 4661 - DNA, 20 bp, Homo Sapiens
tagtgttaatatcttgaaac

SEQ ID NO: 4662 - DNA, 20 bp, Homo Sapiens
agtgttaatatcttgaaaca

SEQ ID NO: 4663 - DNA, 20 bp, Homo Sapiens
gtgttaatatcttgaaacat

SEQ ID NO: 4664 - DNA, 20 bp, Homo Sapiens
tgttaatatcttgaaacata

SEQ ID NO: 4665 - DNA, 20 bp, Homo Sapiens
gttaatatcttgaaacatag

SEQ ID NO: 4666 - DNA, 20 bp, Homo Sapiens
ttaatatcttgaaacataga

SEQ ID NO: 4667 - DNA, 20 bp, Homo Sapiens
taatatcttgaaacatagag

SEQ ID NO: 4668 - DNA, 20 bp, Homo Sapiens
aatatcttgaaacatagaga

SEQ ID NO: 4669 - DNA, 20 bp, Homo Sapiens
atatcttgaaacatagagat

SEQ ID NO: 4670 - DNA, 20 bp, Homo Sapiens
tatcttgaaacatagagatc

SEQ ID NO: 4671 - DNA, 20 bp, Homo Sapiens
atcttgaaacatagagatct

SEQ ID NO: 4672 - DNA, 20 bp, Homo Sapiens
tcttgaaacatagagatcta

SEQ ID NO: 4673 - DNA, 20 bp, Homo Sapiens
cttgaaacatagagatctat

SEQ ID NO: 4674 - DNA, 20 bp, Homo Sapiens
ttgaaacatagagatctatg

SEQ ID NO: 4675 - DNA, 20 bp, Homo Sapiens
tgaaacatagagatctatgt

SEQ ID NO: 4676 - DNA, 20 bp, Homo Sapiens
gaaacatagagatctatgta

SEQ ID NO: 4677 - DNA, 20 bp, Homo Sapiens
aaacatagagatctatgtac

SEQ ID NO: 4678 - DNA, 20 bp, Homo Sapiens
aacatagagatctatgtact

SEQ ID NO: 4679 - DNA, 20 bp, Homo Sapiens
acatagagatctatgtactg

SEQ ID NO: 4680 - DNA, 20 bp, Homo Sapiens
catagagatctatgtactgt

SEQ ID NO: 4681 - DNA, 20 bp, Homo Sapiens
atagagatctatgtactgta

SEQ ID NO: 4682 - DNA, 20 bp, Homo Sapiens
tagagatctatgtactgtaa

SEQ ID NO: 4683 - DNA, 20 bp, Homo Sapiens
agagatctatgtactgtaat

SEQ ID NO: 4684 - DNA, 20 bp, Homo Sapiens
gagatctatgtactgtaata

SEQ ID NO: 4685 - DNA, 20 bp, Homo Sapiens
agatctatgtactgtaatag

SEQ ID NO: 4686 - DNA, 20 bp, Homo Sapiens
gatctatgtactgtaatagt

SEQ ID NO: 4687 - DNA, 20 bp, Homo Sapiens
atctatgtactgtaatagtg

SEQ ID NO: 4688 - DNA, 20 bp, Homo Sapiens
tctatgtactgtaatagtgt

SEQ ID NO: 4689 - DNA, 20 bp, Homo Sapiens
ctatgtactgtaatagtgtg

SEQ ID NO: 4690 - DNA, 20 bp, Homo Sapiens
tatgtactgtaatagtgtga

SEQ ID NO: 4691 - DNA, 20 bp, Homo Sapiens
atgtactgtaatagtgtgat

SEQ ID NO: 4692 - DNA, 20 bp, Homo Sapiens
tgtactgtaatagtgtgatt

SEQ ID NO: 4693 - DNA, 20 bp, Homo Sapiens
gtactgtaatagtgtgatta

SEQ ID NO: 4694 - DNA, 20 bp, Homo Sapiens
tactgtaatagtgtgattac

SEQ ID NO: 4695 - DNA, 20 bp, Homo Sapiens
actgtaatagtgtgattact

SEQ ID NO: 4696 - DNA, 20 bp, Homo Sapiens
ctgtaatagtgtgattacta

SEQ ID NO: 4697 - DNA, 20 bp, Homo Sapiens
tgtaatagtgtgattactat

SEQ ID NO: 4698 - DNA, 20 bp, Homo Sapiens
gtaatagtgtgattactatg

SEQ ID NO: 4699 - DNA, 20 bp, Homo Sapiens
taatagtgtgattactatgc

SEQ ID NO: 4700 - DNA, 20 bp, Homo Sapiens
aatagtgtgattactatgct

SEQ ID NO: 4701 - DNA, 20 bp, Homo Sapiens
atagtgtgattactatgctc

SEQ ID NO: 4702 - DNA, 20 bp, Homo Sapiens
tagtgtgattactatgctct

SEQ ID NO: 4703 - DNA, 20 bp, Homo Sapiens
agtgtgattactatgctcta

SEQ ID NO: 4704 - DNA, 20 bp, Homo Sapiens
gtgtgattactatgctctag

SEQ ID NO: 4705 - DNA, 20 bp, Homo Sapiens
tgtgattactatgctctaga

SEQ ID NO: 4706 - DNA, 20 bp, Homo Sapiens
gtgattactatgctctagag

SEQ ID NO: 4707 - DNA, 20 bp, Homo Sapiens
tgattactatgctctagaga

SEQ ID NO: 4708 - DNA, 20 bp, Homo Sapiens
gattactatgctctagagaa

SEQ ID NO: 4709 - DNA, 20 bp, Homo Sapiens
attactatgctctagagaaa

SEQ ID NO: 4710 - DNA, 20 bp, Homo Sapiens
ttactatgctctagagaaaa

SEQ ID NO: 4711 - DNA, 20 bp, Homo Sapiens
tactatgctctagagaaaag

SEQ ID NO: 4712 - DNA, 20 bp, Homo Sapiens
actatgctctagagaaaagt

SEQ ID NO: 4713 - DNA, 20 bp, Homo Sapiens
ctatgctctagagaaaagtc

SEQ ID NO: 4714 - DNA, 20 bp, Homo Sapiens
tatgctctagagaaaagtct

SEQ ID NO: 4715 - DNA, 20 bp, Homo Sapiens
atgctctagagaaaagtcta

SEQ ID NO: 4716 - DNA, 20 bp, Homo Sapiens
tgctctagagaaaagtctac

SEQ ID NO: 4717 - DNA, 20 bp, Homo Sapiens
gctctagagaaaagtctacc

SEQ ID NO: 4718 - DNA, 20 bp, Homo Sapiens
ctctagagaaaagtctaccc

SEQ ID NO: 4719 - DNA, 20 bp, Homo Sapiens
tctagagaaaagtctacccc

SEQ ID NO: 4720 - DNA, 20 bp, Homo Sapiens
ctagagaaaagtctacccct

SEQ ID NO: 4721 - DNA, 20 bp, Homo Sapiens
tagagaaaagtctacccctg

SEQ ID NO: 4722 - DNA, 20 bp, Homo Sapiens
agagaaaagtctacccctgc

SEQ ID NO: 4723 - DNA, 20 bp, Homo Sapiens
gagaaaagtctacccctgct

SEQ ID NO: 4724 - DNA, 20 bp, Homo Sapiens
agaaaagtctacccctgcta

SEQ ID NO: 4725 - DNA, 20 bp, Homo Sapiens
gaaaagtctacccctgctaa

SEQ ID NO: 4726 - DNA, 20 bp, Homo Sapiens
aaaagtctacccctgctaag

SEQ ID NO: 4727 - DNA, 20 bp, Homo Sapiens
aaagtctacccctgctaagg

SEQ ID NO: 4728 - DNA, 20 bp, Homo Sapiens
aagtctacccctgctaagga

SEQ ID NO: 4729 - DNA, 20 bp, Homo Sapiens
agtctacccctgctaaggag

SEQ ID NO: 4730 - DNA, 20 bp, Homo Sapiens
gtctacccctgctaaggagt

SEQ ID NO: 4731 - DNA, 20 bp, Homo Sapiens
tctacccctgctaaggagtt

SEQ ID NO: 4732 - DNA, 20 bp, Homo Sapiens
ctacccctgctaaggagttc

SEQ ID NO: 4733 - DNA, 20 bp, Homo Sapiens
tacccctgctaaggagttct

SEQ ID NO: 4734 - DNA, 20 bp, Homo Sapiens
acccctgctaaggagttctc

SEQ ID NO: 4735 - DNA, 20 bp, Homo Sapiens
cccctgctaaggagttctca

SEQ ID NO: 4736 - DNA, 20 bp, Homo Sapiens
ccctgctaaggagttctcat

SEQ ID NO: 4737 - DNA, 20 bp, Homo Sapiens
cctgctaaggagttctcatc

SEQ ID NO: 4738 - DNA, 20 bp, Homo Sapiens
ctgctaaggagttctcatcc

SEQ ID NO: 4739 - DNA, 20 bp, Homo Sapiens
tgctaaggagttctcatccc

SEQ ID NO: 4740 - DNA, 20 bp, Homo Sapiens
gctaaggagttctcatccct

SEQ ID NO: 4741 - DNA, 20 bp, Homo Sapiens
ctaaggagttctcatccctc

SEQ ID NO: 4742 - DNA, 20 bp, Homo Sapiens
taaggagttctcatccctct

SEQ ID NO: 4743 - DNA, 20 bp, Homo Sapiens
aaggagttctcatccctctg

SEQ ID NO: 4744 - DNA, 20 bp, Homo Sapiens
aggagttctcatccctctgt

SEQ ID NO: 4745 - DNA, 20 bp, Homo Sapiens
ggagttctcatccctctgtc

SEQ ID NO: 4746 - DNA, 20 bp, Homo Sapiens
gagttctcatccctctgtca

SEQ ID NO: 4747 - DNA, 20 bp, Homo Sapiens
agttctcatccctctgtcag

SEQ ID NO: 4748 - DNA, 20 bp, Homo Sapiens
gttctcatccctctgtcagg

SEQ ID NO: 4749 - DNA, 20 bp, Homo Sapiens
ttctcatccctctgtcaggg

SEQ ID NO: 4750 - DNA, 20 bp, Homo Sapiens
tctcatccctctgtcagggt

SEQ ID NO: 4751 - DNA, 20 bp, Homo Sapiens
ctcatccctctgtcagggtc

SEQ ID NO: 4752 - DNA, 20 bp, Homo Sapiens
tcatccctctgtcagggtca

SEQ ID NO: 4753 - DNA, 20 bp, Homo Sapiens
catccctctgtcagggtcag

SEQ ID NO: 4754 - DNA, 20 bp, Homo Sapiens
atccctctgtcagggtcagt

SEQ ID NO: 4755 - DNA, 20 bp, Homo Sapiens
tccctctgtcagggtcagta

SEQ ID NO: 4756 - DNA, 20 bp, Homo Sapiens
ccctctgtcagggtcagtaa

SEQ ID NO: 4757 - DNA, 20 bp, Homo Sapiens
cctctgtcagggtcagtaag

SEQ ID NO: 4758 - DNA, 20 bp, Homo Sapiens
ctctgtcagggtcagtaagg

SEQ ID NO: 4759 - DNA, 20 bp, Homo Sapiens
tctgtcagggtcagtaagga

SEQ ID NO: 4760 - DNA, 20 bp, Homo Sapiens
ctgtcagggtcagtaaggaa

SEQ ID NO: 4761 - DNA, 20 bp, Homo Sapiens
tgtcagggtcagtaaggaaa

SEQ ID NO: 4762 - DNA, 20 bp, Homo Sapiens
gtcagggtcagtaaggaaaa

SEQ ID NO: 4763 - DNA, 20 bp, Homo Sapiens
tcagggtcagtaaggaaaac

SEQ ID NO: 4764 - DNA, 20 bp, Homo Sapiens
cagggtcagtaaggaaaacg

SEQ ID NO: 4765 - DNA, 20 bp, Homo Sapiens
agggtcagtaaggaaaacgg

SEQ ID NO: 4766 - DNA, 20 bp, Homo Sapiens
gggtcagtaaggaaaacggt

SEQ ID NO: 4767 - DNA, 20 bp, Homo Sapiens
ggtcagtaaggaaaacggtg

SEQ ID NO: 4768 - DNA, 20 bp, Homo Sapiens
gtcagtaaggaaaacggtgg

SEQ ID NO: 4769 - DNA, 20 bp, Homo Sapiens
tcagtaaggaaaacggtggc

SEQ ID NO: 4770 - DNA, 20 bp, Homo Sapiens
cagtaaggaaaacggtggcc

SEQ ID NO: 4771 - DNA, 20 bp, Homo Sapiens
agtaaggaaaacggtggcct

SEQ ID NO: 4772 - DNA, 20 bp, Homo Sapiens
gtaaggaaaacggtggccta

SEQ ID NO: 4773 - DNA, 20 bp, Homo Sapiens
taaggaaaacggtggcctag

SEQ ID NO: 4774 - DNA, 20 bp, Homo Sapiens
aaggaaaacggtggcctagg

SEQ ID NO: 4775 - DNA, 20 bp, Homo Sapiens
aggaaaacggtggcctaggg

SEQ ID NO: 4776 - DNA, 20 bp, Homo Sapiens
ggaaaacggtggcctagggt

SEQ ID NO: 4777 - DNA, 20 bp, Homo Sapiens
gaaaacggtggcctagggta

SEQ ID NO: 4778 - DNA, 20 bp, Homo Sapiens
aaaacggtggcctagggtac

SEQ ID NO: 4779 - DNA, 20 bp, Homo Sapiens
aaacggtggcctagggtaca

SEQ ID NO: 4780 - DNA, 20 bp, Homo Sapiens
aacggtggcctagggtacag

SEQ ID NO: 4781 - DNA, 20 bp, Homo Sapiens
acggtggcctagggtacagg

SEQ ID NO: 4782 - DNA, 20 bp, Homo Sapiens
cggtggcctagggtacaggc

SEQ ID NO: 4783 - DNA, 20 bp, Homo Sapiens
ggtggcctagggtacaggca

SEQ ID NO: 4784 - DNA, 20 bp, Homo Sapiens
gtggcctagggtacaggcaa

SEQ ID NO: 4785 - DNA, 20 bp, Homo Sapiens
tggcctagggtacaggcaac

SEQ ID NO: 4786 - DNA, 20 bp, Homo Sapiens
ggcctagggtacaggcaaca

SEQ ID NO: 4787 - DNA, 20 bp, Homo Sapiens
gcctagggtacaggcaacaa

SEQ ID NO: 4788 - DNA, 20 bp, Homo Sapiens
cctagggtacaggcaacaat

SEQ ID NO: 4789 - DNA, 20 bp, Homo Sapiens
ctagggtacaggcaacaatg

SEQ ID NO: 4790 - DNA, 20 bp, Homo Sapiens
tagggtacaggcaacaatga

SEQ ID NO: 4791 - DNA, 20 bp, Homo Sapiens
agggtacaggcaacaatgag

SEQ ID NO: 4792 - DNA, 20 bp, Homo Sapiens
gggtacaggcaacaatgagc

SEQ ID NO: 4793 - DNA, 20 bp, Homo Sapiens
ggtacaggcaacaatgagca

SEQ ID NO: 4794 - DNA, 20 bp, Homo Sapiens
gtacaggcaacaatgagcag

SEQ ID NO: 4795 - DNA, 20 bp, Homo Sapiens
tacaggcaacaatgagcaga

SEQ ID NO: 4796 - DNA, 20 bp, Homo Sapiens
acaggcaacaatgagcagac

SEQ ID NO: 4797 - DNA, 20 bp, Homo Sapiens
caggcaacaatgagcagacc

SEQ ID NO: 4798 - DNA, 20 bp, Homo Sapiens
aggcaacaatgagcagacca

SEQ ID NO: 4799 - DNA, 20 bp, Homo Sapiens
ggcaacaatgagcagaccaa

SEQ ID NO: 4800 - DNA, 20 bp, Homo Sapiens
gcaacaatgagcagaccaac

SEQ ID NO: 4801 - DNA, 20 bp, Homo Sapiens
caacaatgagcagaccaacc

SEQ ID NO: 4802 - DNA, 20 bp, Homo Sapiens
aacaatgagcagaccaacct

SEQ ID NO: 4803 - DNA, 20 bp, Homo Sapiens
acaatgagcagaccaaccta

SEQ ID NO: 4804 - DNA, 20 bp, Homo Sapiens
caatgagcagaccaacctaa

SEQ ID NO: 4805 - DNA, 20 bp, Homo Sapiens
aatgagcagaccaacctaaa

SEQ ID NO: 4806 - DNA, 20 bp, Homo Sapiens
atgagcagaccaacctaaat

SEQ ID NO: 4807 - DNA, 20 bp, Homo Sapiens
tgagcagaccaacctaaatt

SEQ ID NO: 4808 - DNA, 20 bp, Homo Sapiens
gagcagaccaacctaaattt

SEQ ID NO: 4809 - DNA, 20 bp, Homo Sapiens
agcagaccaacctaaatttg

SEQ ID NO: 4810 - DNA, 20 bp, Homo Sapiens
gcagaccaacctaaatttgg

SEQ ID NO: 4811 - DNA, 20 bp, Homo Sapiens
cagaccaacctaaatttggg

SEQ ID NO: 4812 - DNA, 20 bp, Homo Sapiens
agaccaacctaaatttgggg

SEQ ID NO: 4813 - DNA, 20 bp, Homo Sapiens
gaccaacctaaatttgggga

SEQ ID NO: 4814 - DNA, 20 bp, Homo Sapiens
accaacctaaatttggggaa

SEQ ID NO: 4815 - DNA, 20 bp, Homo Sapiens
ccaacctaaatttggggaaa

SEQ ID NO: 4816 - DNA, 20 bp, Homo Sapiens
caacctaaatttggggaaat

SEQ ID NO: 4817 - DNA, 20 bp, Homo Sapiens
aacctaaatttggggaaatt

SEQ ID NO: 4818 - DNA, 20 bp, Homo Sapiens
acctaaatttggggaaatta

SEQ ID NO: 4819 - DNA, 20 bp, Homo Sapiens
cctaaatttggggaaattag

SEQ ID NO: 4820 - DNA, 20 bp, Homo Sapiens
ctaaatttggggaaattagg

SEQ ID NO: 4821 - DNA, 20 bp, Homo Sapiens
taaatttggggaaattagga

SEQ ID NO: 4822 - DNA, 20 bp, Homo Sapiens
aaatttggggaaattaggag

SEQ ID NO: 4823 - DNA, 20 bp, Homo Sapiens
aatttggggaaattaggaga

SEQ ID NO: 4824 - DNA, 20 bp, Homo Sapiens
atttggggaaattaggagag

SEQ ID NO: 4825 - DNA, 20 bp, Homo Sapiens
tttggggaaattaggagagg

SEQ ID NO: 4826 - DNA, 20 bp, Homo Sapiens
ttggggaaattaggagaggc

SEQ ID NO: 4827 - DNA, 20 bp, Homo Sapiens
tggggaaattaggagaggca

SEQ ID NO: 4828 - DNA, 20 bp, Homo Sapiens
ggggaaattaggagaggcag

SEQ ID NO: 4829 - DNA, 20 bp, Homo Sapiens
gggaaattaggagaggcaga

SEQ ID NO: 4830 - DNA, 20 bp, Homo Sapiens
ggaaattaggagaggcagag

SEQ ID NO: 4831 - DNA, 20 bp, Homo Sapiens
gaaattaggagaggcagaga

SEQ ID NO: 4832 - DNA, 20 bp, Homo Sapiens
aaattaggagaggcagagat

SEQ ID NO: 4833 - DNA, 20 bp, Homo Sapiens
aattaggagaggcagagata

SEQ ID NO: 4834 - DNA, 20 bp, Homo Sapiens
attaggagaggcagagatag

SEQ ID NO: 4835 - DNA, 20 bp, Homo Sapiens
ttaggagaggcagagataga

SEQ ID NO: 4836 - DNA, 20 bp, Homo Sapiens
taggagaggcagagatagaa

SEQ ID NO: 4837 - DNA, 20 bp, Homo Sapiens
aggagaggcagagatagaac

SEQ ID NO: 4838 - DNA, 20 bp, Homo Sapiens
ggagaggcagagatagaacc

SEQ ID NO: 4839 - DNA, 20 bp, Homo Sapiens
gagaggcagagatagaacct

SEQ ID NO: 4840 - DNA, 20 bp, Homo Sapiens
agaggcagagatagaacctg

SEQ ID NO: 4841 - DNA, 20 bp, Homo Sapiens
gaggcagagatagaacctgg

SEQ ID NO: 4842 - DNA, 20 bp, Homo Sapiens
aggcagagatagaacctgga

SEQ ID NO: 4843 - DNA, 20 bp, Homo Sapiens
ggcagagatagaacctggag

SEQ ID NO: 4844 - DNA, 20 bp, Homo Sapiens
gcagagatagaacctggagc

SEQ ID NO: 4845 - DNA, 20 bp, Homo Sapiens
cagagatagaacctggagcc

SEQ ID NO: 4846 - DNA, 20 bp, Homo Sapiens
agagatagaacctggagcca

SEQ ID NO: 4847 - DNA, 20 bp, Homo Sapiens
gagatagaacctggagccac

SEQ ID NO: 4848 - DNA, 20 bp, Homo Sapiens
agatagaacctggagccact

SEQ ID NO: 4849 - DNA, 20 bp, Homo Sapiens
gatagaacctggagccactt

SEQ ID NO: 4850 - DNA, 20 bp, Homo Sapiens
atagaacctggagccacttc

SEQ ID NO: 4851 - DNA, 20 bp, Homo Sapiens
tagaacctggagccacttct

SEQ ID NO: 4852 - DNA, 20 bp, Homo Sapiens
agaacctggagccacttcta

SEQ ID NO: 4853 - DNA, 20 bp, Homo Sapiens
gaacctggagccacttctat

SEQ ID NO: 4854 - DNA, 20 bp, Homo Sapiens
aacctggagccacttctatc

SEQ ID NO: 4855 - DNA, 20 bp, Homo Sapiens
acctggagccacttctatct

SEQ ID NO: 4856 - DNA, 20 bp, Homo Sapiens
cctggagccacttctatctg

SEQ ID NO: 4857 - DNA, 20 bp, Homo Sapiens
ctggagccacttctatctgg

SEQ ID NO: 4858 - DNA, 20 bp, Homo Sapiens
tggagccacttctatctggg

SEQ ID NO: 4859 - DNA, 20 bp, Homo Sapiens
ggagccacttctatctgggc

SEQ ID NO: 4860 - DNA, 20 bp, Homo Sapiens
gagccacttctatctgggct

SEQ ID NO: 4861 - DNA, 20 bp, Homo Sapiens
agccacttctatctgggctg

SEQ ID NO: 4862 - DNA, 20 bp, Homo Sapiens
gccacttctatctgggctgt

SEQ ID NO: 4863 - DNA, 20 bp, Homo Sapiens
ccacttctatctgggctgtt

SEQ ID NO: 4864 - DNA, 20 bp, Homo Sapiens
cacttctatctgggctgttg

SEQ ID NO: 4865 - DNA, 20 bp, Homo Sapiens
acttctatctgggctgttgc

SEQ ID NO: 4866 - DNA, 20 bp, Homo Sapiens
cttctatctgggctgttgct

SEQ ID NO: 4867 - DNA, 20 bp, Homo Sapiens
ttctatctgggctgttgcta

SEQ ID NO: 4868 - DNA, 20 bp, Homo Sapiens
tctatctgggctgttgctaa

SEQ ID NO: 4869 - DNA, 20 bp, Homo Sapiens
ctatctgggctgttgctaat

SEQ ID NO: 4870 - DNA, 20 bp, Homo Sapiens
tatctgggctgttgctaata

SEQ ID NO: 4871 - DNA, 20 bp, Homo Sapiens
atctgggctgttgctaatat

SEQ ID NO: 4872 - DNA, 20 bp, Homo Sapiens
tctgggctgttgctaatatt

SEQ ID NO: 4873 - DNA, 20 bp, Homo Sapiens
ctgggctgttgctaatattg

SEQ ID NO: 4874 - DNA, 20 bp, Homo Sapiens
tgggctgttgctaatattga

SEQ ID NO: 4875 - DNA, 20 bp, Homo Sapiens
gggctgttgctaatattgag

SEQ ID NO: 4876 - DNA, 20 bp, Homo Sapiens
ggctgttgctaatattgagg

SEQ ID NO: 4877 - DNA, 20 bp, Homo Sapiens
gctgttgctaatattgagga

SEQ ID NO: 4878 - DNA, 20 bp, Homo Sapiens
ctgttgctaatattgaggag

SEQ ID NO: 4879 - DNA, 20 bp, Homo Sapiens
tgttgctaatattgaggagg

SEQ ID NO: 4880 - DNA, 20 bp, Homo Sapiens
gttgctaatattgaggaggc

SEQ ID NO: 4881 - DNA, 20 bp, Homo Sapiens
ttgctaatattgaggaggct

SEQ ID NO: 4882 - DNA, 20 bp, Homo Sapiens
tgctaatattgaggaggctt

SEQ ID NO: 4883 - DNA, 20 bp, Homo Sapiens
gctaatattgaggaggcttg

SEQ ID NO: 4884 - DNA, 20 bp, Homo Sapiens
ctaatattgaggaggcttgc

SEQ ID NO: 4885 - DNA, 20 bp, Homo Sapiens
taatattgaggaggcttgcc

SEQ ID NO: 4886 - DNA, 20 bp, Homo Sapiens
aatattgaggaggcttgccc

SEQ ID NO: 4887 - DNA, 20 bp, Homo Sapiens
atattgaggaggcttgcccc

SEQ ID NO: 4888 - DNA, 20 bp, Homo Sapiens
tattgaggaggcttgcccca

SEQ ID NO: 4889 - DNA, 20 bp, Homo Sapiens
attgaggaggcttgccccac

SEQ ID NO: 4890 - DNA, 20 bp, Homo Sapiens
ttgaggaggcttgccccacc

SEQ ID NO: 4891 - DNA, 20 bp, Homo Sapiens
tgaggaggcttgccccaccc

SEQ ID NO: 4892 - DNA, 20 bp, Homo Sapiens
gaggaggcttgccccaccca

SEQ ID NO: 4893 - DNA, 20 bp, Homo Sapiens
aggaggcttgccccacccaa

SEQ ID NO: 4894 - DNA, 20 bp, Homo Sapiens
ggaggcttgccccacccaac

SEQ ID NO: 4895 - DNA, 20 bp, Homo Sapiens
gaggcttgccccacccaaca

SEQ ID NO: 4896 - DNA, 20 bp, Homo Sapiens
aggcttgccccacccaacaa

SEQ ID NO: 4897 - DNA, 20 bp, Homo Sapiens
ggcttgccccacccaacaag

SEQ ID NO: 4898 - DNA, 20 bp, Homo Sapiens
gcttgccccacccaacaagc

SEQ ID NO: 4899 - DNA, 20 bp, Homo Sapiens
cttgccccacccaacaagcc

SEQ ID NO: 4900 - DNA, 20 bp, Homo Sapiens
ttgccccacccaacaagcca

SEQ ID NO: 4901 - DNA, 20 bp, Homo Sapiens
tgccccacccaacaagccat

SEQ ID NO: 4902 - DNA, 20 bp, Homo Sapiens
gccccacccaacaagccata

SEQ ID NO: 4903 - DNA, 20 bp, Homo Sapiens
ccccacccaacaagccatag

SEQ ID NO: 4904 - DNA, 20 bp, Homo Sapiens
cccacccaacaagccatagt

SEQ ID NO: 4905 - DNA, 20 bp, Homo Sapiens
ccacccaacaagccatagtg

SEQ ID NO: 4906 - DNA, 20 bp, Homo Sapiens
cacccaacaagccatagtgg

SEQ ID NO: 4907 - DNA, 20 bp, Homo Sapiens
acccaacaagccatagtgga

SEQ ID NO: 4908 - DNA, 20 bp, Homo Sapiens
cccaacaagccatagtggag

SEQ ID NO: 4909 - DNA, 20 bp, Homo Sapiens
ccaacaagccatagtggaga

SEQ ID NO: 4910 - DNA, 20 bp, Homo Sapiens
caacaagccatagtggagag

SEQ ID NO: 4911 - DNA, 20 bp, Homo Sapiens
aacaagccatagtggagaga

SEQ ID NO: 4912 - DNA, 20 bp, Homo Sapiens
acaagccatagtggagagaa

SEQ ID NO: 4913 - DNA, 20 bp, Homo Sapiens
caagccatagtggagagaac

SEQ ID NO: 4914 - DNA, 20 bp, Homo Sapiens
aagccatagtggagagaact

SEQ ID NO: 4915 - DNA, 20 bp, Homo Sapiens
agccatagtggagagaactg

SEQ ID NO: 4916 - DNA, 20 bp, Homo Sapiens
gccatagtggagagaactga

SEQ ID NO: 4917 - DNA, 20 bp, Homo Sapiens
ccatagtggagagaactgaa

SEQ ID NO: 4918 - DNA, 20 bp, Homo Sapiens
catagtggagagaactgaat

SEQ ID NO: 4919 - DNA, 20 bp, Homo Sapiens
atagtggagagaactgaata

SEQ ID NO: 4920 - DNA, 20 bp, Homo Sapiens
tagtggagagaactgaataa

SEQ ID NO: 4921 - DNA, 20 bp, Homo Sapiens
agtggagagaactgaataaa

SEQ ID NO: 4922 - DNA, 20 bp, Homo Sapiens
gtggagagaactgaataaac

SEQ ID NO: 4923 - DNA, 20 bp, Homo Sapiens
tggagagaactgaataaaca

SEQ ID NO: 4924 - DNA, 20 bp, Homo Sapiens
ggagagaactgaataaacag

SEQ ID NO: 4925 - DNA, 20 bp, Homo Sapiens
gagagaactgaataaacagg

SEQ ID NO: 4926 - DNA, 20 bp, Homo Sapiens
agagaactgaataaacagga

SEQ ID NO: 4927 - DNA, 20 bp, Homo Sapiens
gagaactgaataaacaggaa

SEQ ID NO: 4928 - DNA, 20 bp, Homo Sapiens
agaactgaataaacaggaaa

SEQ ID NO: 4929 - DNA, 20 bp, Homo Sapiens
gaactgaataaacaggaaaa

SEQ ID NO: 4930 - DNA, 20 bp, Homo Sapiens
aactgaataaacaggaaaat

SEQ ID NO: 4931 - DNA, 20 bp, Homo Sapiens
actgaataaacaggaaaatg

SEQ ID NO: 4932 - DNA, 20 bp, Homo Sapiens
ctgaataaacaggaaaatgc

SEQ ID NO: 4933 - DNA, 20 bp, Homo Sapiens
tgaataaacaggaaaatgcc

SEQ ID NO: 4934 - DNA, 20 bp, Homo Sapiens
gaataaacaggaaaatgcca

SEQ ID NO: 4935 - DNA, 20 bp, Homo Sapiens
aataaacaggaaaatgccag

SEQ ID NO: 4936 - DNA, 20 bp, Homo Sapiens
ataaacaggaaaatgccaga

SEQ ID NO: 4937 - DNA, 20 bp, Homo Sapiens
taaacaggaaaatgccagag

SEQ ID NO: 4938 - DNA, 20 bp, Homo Sapiens
aaacaggaaaatgccagagc

SEQ ID NO: 4939 - DNA, 20 bp, Homo Sapiens
aacaggaaaatgccagagct

SEQ ID NO: 4940 - DNA, 20 bp, Homo Sapiens
acaggaaaatgccagagctt

SEQ ID NO: 4941 - DNA, 20 bp, Homo Sapiens
caggaaaatgccagagcttg

SEQ ID NO: 4942 - DNA, 20 bp, Homo Sapiens
aggaaaatgccagagcttgt

SEQ ID NO: 4943 - DNA, 20 bp, Homo Sapiens
ggaaaatgccagagcttgtg

SEQ ID NO: 4944 - DNA, 20 bp, Homo Sapiens
gaaaatgccagagcttgtga

SEQ ID NO: 4945 - DNA, 20 bp, Homo Sapiens
aaaatgccagagcttgtgaa

SEQ ID NO: 4946 - DNA, 20 bp, Homo Sapiens
aaatgccagagcttgtgaac

SEQ ID NO: 4947 - DNA, 20 bp, Homo Sapiens
aatgccagagcttgtgaacc

SEQ ID NO: 4948 - DNA, 20 bp, Homo Sapiens
atgccagagcttgtgaaccc

SEQ ID NO: 4949 - DNA, 20 bp, Homo Sapiens
tgccagagcttgtgaaccct

SEQ ID NO: 4950 - DNA, 20 bp, Homo Sapiens
gccagagcttgtgaaccctg

SEQ ID NO: 4951 - DNA, 20 bp, Homo Sapiens
ccagagcttgtgaaccctgt

SEQ ID NO: 4952 - DNA, 20 bp, Homo Sapiens
cagagcttgtgaaccctgtt

SEQ ID NO: 4953 - DNA, 20 bp, Homo Sapiens
agagcttgtgaaccctgttt

SEQ ID NO: 4954 - DNA, 20 bp, Homo Sapiens
gagcttgtgaaccctgtttc

SEQ ID NO: 4955 - DNA, 20 bp, Homo Sapiens
agcttgtgaaccctgtttct

SEQ ID NO: 4956 - DNA, 20 bp, Homo Sapiens
gcttgtgaaccctgtttctc

SEQ ID NO: 4957 - DNA, 20 bp, Homo Sapiens
cttgtgaaccctgtttctct

SEQ ID NO: 4958 - DNA, 20 bp, Homo Sapiens
ttgtgaaccctgtttctctt

SEQ ID NO: 4959 - DNA, 20 bp, Homo Sapiens
tgtgaaccctgtttctcttg

SEQ ID NO: 4960 - DNA, 20 bp, Homo Sapiens
gtgaaccctgtttctcttga

SEQ ID NO: 4961 - DNA, 20 bp, Homo Sapiens
tgaaccctgtttctcttgaa

SEQ ID NO: 4962 - DNA, 20 bp, Homo Sapiens
gaaccctgtttctcttgaag

SEQ ID NO: 4963 - DNA, 20 bp, Homo Sapiens
aaccctgtttctcttgaaga

SEQ ID NO: 4964 - DNA, 20 bp, Homo Sapiens
accctgtttctcttgaagaa

SEQ ID NO: 4965 - DNA, 20 bp, Homo Sapiens
ccctgtttctcttgaagaac

SEQ ID NO: 4966 - DNA, 20 bp, Homo Sapiens
cctgtttctcttgaagaact

SEQ ID NO: 4967 - DNA, 20 bp, Homo Sapiens
ctgtttctcttgaagaactg

SEQ ID NO: 4968 - DNA, 20 bp, Homo Sapiens
tgtttctcttgaagaactga

SEQ ID NO: 4969 - DNA, 20 bp, Homo Sapiens
gtttctcttgaagaactgac

SEQ ID NO: 4970 - DNA, 20 bp, Homo Sapiens
tttctcttgaagaactgact

SEQ ID NO: 4971 - DNA, 20 bp, Homo Sapiens
ttctcttgaagaactgacta

SEQ ID NO: 4972 - DNA, 20 bp, Homo Sapiens
tctcttgaagaactgactag

SEQ ID NO: 4973 - DNA, 20 bp, Homo Sapiens
ctcttgaagaactgactagt

SEQ ID NO: 4974 - DNA, 20 bp, Homo Sapiens
tcttgaagaactgactagtg

SEQ ID NO: 4975 - DNA, 20 bp, Homo Sapiens
cttgaagaactgactagtga

SEQ ID NO: 4976 - DNA, 20 bp, Homo Sapiens
ttgaagaactgactagtgag

SEQ ID NO: 4977 - DNA, 20 bp, Homo Sapiens
tgaagaactgactagtgaga

SEQ ID NO: 4978 - DNA, 20 bp, Homo Sapiens
gaagaactgactagtgagat

SEQ ID NO: 4979 - DNA, 20 bp, Homo Sapiens
aagaactgactagtgagatg

SEQ ID NO: 4980 - DNA, 20 bp, Homo Sapiens
agaactgactagtgagatgg

SEQ ID NO: 4981 - DNA, 20 bp, Homo Sapiens
gaactgactagtgagatggc

SEQ ID NO: 4982 - DNA, 20 bp, Homo Sapiens
aactgactagtgagatggcc

SEQ ID NO: 4983 - DNA, 20 bp, Homo Sapiens
actgactagtgagatggcct

SEQ ID NO: 4984 - DNA, 20 bp, Homo Sapiens
ctgactagtgagatggcctg

SEQ ID NO: 4985 - DNA, 20 bp, Homo Sapiens
tgactagtgagatggcctgg

SEQ ID NO: 4986 - DNA, 20 bp, Homo Sapiens
gactagtgagatggcctggg

SEQ ID NO: 4987 - DNA, 20 bp, Homo Sapiens
actagtgagatggcctgggg

SEQ ID NO: 4988 - DNA, 20 bp, Homo Sapiens
ctagtgagatggcctgggga

SEQ ID NO: 4989 - DNA, 20 bp, Homo Sapiens
tagtgagatggcctggggaa

SEQ ID NO: 4990 - DNA, 20 bp, Homo Sapiens
agtgagatggcctggggaag

SEQ ID NO: 4991 - DNA, 20 bp, Homo Sapiens
gtgagatggcctggggaagc

SEQ ID NO: 4992 - DNA, 20 bp, Homo Sapiens
tgagatggcctggggaagct

SEQ ID NO: 4993 - DNA, 20 bp, Homo Sapiens
gagatggcctggggaagctg

SEQ ID NO: 4994 - DNA, 20 bp, Homo Sapiens
agatggcctggggaagctgt

SEQ ID NO: 4995 - DNA, 20 bp, Homo Sapiens
gatggcctggggaagctgtg

SEQ ID NO: 4996 - DNA, 20 bp, Homo Sapiens
atggcctggggaagctgtga

SEQ ID NO: 4997 - DNA, 20 bp, Homo Sapiens
tggcctggggaagctgtgaa

SEQ ID NO: 4998 - DNA, 20 bp, Homo Sapiens
ggcctggggaagctgtgaaa

SEQ ID NO: 4999 - DNA, 20 bp, Homo Sapiens
gcctggggaagctgtgaaag

SEQ ID NO: 5000 - DNA, 20 bp, Homo Sapiens
cctggggaagctgtgaaaga

SEQ ID NO: 5001 - DNA, 20 bp, Homo Sapiens
ctggggaagctgtgaaagaa

SEQ ID NO: 5002 - DNA, 20 bp, Homo Sapiens
tggggaagctgtgaaagaac

SEQ ID NO: 5003 - DNA, 20 bp, Homo Sapiens
ggggaagctgtgaaagaacc

SEQ ID NO: 5004 - DNA, 20 bp, Homo Sapiens
gggaagctgtgaaagaacca

SEQ ID NO: 5005 - DNA, 20 bp, Homo Sapiens
ggaagctgtgaaagaaccaa

SEQ ID NO: 5006 - DNA, 20 bp, Homo Sapiens
gaagctgtgaaagaaccaaa

SEQ ID NO: 5007 - DNA, 20 bp, Homo Sapiens
aagctgtgaaagaaccaaaa

SEQ ID NO: 5008 - DNA, 20 bp, Homo Sapiens
agctgtgaaagaaccaaaag

SEQ ID NO: 5009 - DNA, 20 bp, Homo Sapiens
gctgtgaaagaaccaaaaga

SEQ ID NO: 5010 - DNA, 20 bp, Homo Sapiens
ctgtgaaagaaccaaaagag

SEQ ID NO: 5011 - DNA, 20 bp, Homo Sapiens
tgtgaaagaaccaaaagaga

SEQ ID NO: 5012 - DNA, 20 bp, Homo Sapiens
gtgaaagaaccaaaagagat

SEQ ID NO: 5013 - DNA, 20 bp, Homo Sapiens
tgaaagaaccaaaagagatc

SEQ ID NO: 5014 - DNA, 20 bp, Homo Sapiens
gaaagaaccaaaagagatca

SEQ ID NO: 5015 - DNA, 20 bp, Homo Sapiens
aaagaaccaaaagagatcac

SEQ ID NO: 5016 - DNA, 20 bp, Homo Sapiens
aagaaccaaaagagatcaca

SEQ ID NO: 5017 - DNA, 20 bp, Homo Sapiens
agaaccaaaagagatcacaa

SEQ ID NO: 5018 - DNA, 20 bp, Homo Sapiens
gaaccaaaagagatcacaat

SEQ ID NO: 5019 - DNA, 20 bp, Homo Sapiens
aaccaaaagagatcacaata

SEQ ID NO: 5020 - DNA, 20 bp, Homo Sapiens
accaaaagagatcacaatac

SEQ ID NO: 5021 - DNA, 20 bp, Homo Sapiens
ccaaaagagatcacaatact

SEQ ID NO: 5022 - DNA, 20 bp, Homo Sapiens
caaaagagatcacaatactc

SEQ ID NO: 5023 - DNA, 20 bp, Homo Sapiens
aaaagagatcacaatactca

SEQ ID NO: 5024 - DNA, 20 bp, Homo Sapiens
aaagagatcacaatactcaa

SEQ ID NO: 5025 - DNA, 20 bp, Homo Sapiens
aagagatcacaatactcaaa

SEQ ID NO: 5026 - DNA, 20 bp, Homo Sapiens
agagatcacaatactcaaaa

SEQ ID NO: 5027 - DNA, 20 bp, Homo Sapiens
gagatcacaatactcaaaag

SEQ ID NO: 5028 - DNA, 20 bp, Homo Sapiens
agatcacaatactcaaaaga

SEQ ID NO: 5029 - DNA, 20 bp, Homo Sapiens
gatcacaatactcaaaagag

SEQ ID NO: 5030 - DNA, 20 bp, Homo Sapiens
atcacaatactcaaaagaga

SEQ ID NO: 5031 - DNA, 20 bp, Homo Sapiens
tcacaatactcaaaagagag

SEQ ID NO: 5032 - DNA, 20 bp, Homo Sapiens
cacaatactcaaaagagaga

SEQ ID NO: 5033 - DNA, 20 bp, Homo Sapiens
acaatactcaaaagagagag

SEQ ID NO: 5034 - DNA, 20 bp, Homo Sapiens
caatactcaaaagagagaga

SEQ ID NO: 5035 - DNA, 20 bp, Homo Sapiens
aatactcaaaagagagagag

SEQ ID NO: 5036 - DNA, 20 bp, Homo Sapiens
atactcaaaagagagagaga

SEQ ID NO: 5037 - DNA, 20 bp, Homo Sapiens
tactcaaaagagagagagag

SEQ ID NO: 5038 - DNA, 20 bp, Homo Sapiens
actcaaaagagagagagaga

SEQ ID NO: 5039 - DNA, 20 bp, Homo Sapiens
ctcaaaagagagagagagag

SEQ ID NO: 5040 - DNA, 20 bp, Homo Sapiens
tcaaaagagagagagagaga

SEQ ID NO: 5041 - DNA, 20 bp, Homo Sapiens
caaaagagagagagagagaa

SEQ ID NO: 5042 - DNA, 20 bp, Homo Sapiens
aaaagagagagagagagaaa

SEQ ID NO: 5043 - DNA, 20 bp, Homo Sapiens
aaagagagagagagagaaaa

SEQ ID NO: 5044 - DNA, 20 bp, Homo Sapiens
aagagagagagagagaaaaa

SEQ ID NO: 5045 - DNA, 20 bp, Homo Sapiens
agagagagagagagaaaaaa

SEQ ID NO: 5046 - DNA, 20 bp, Homo Sapiens
gagagagagagagaaaaaag

SEQ ID NO: 5047 - DNA, 20 bp, Homo Sapiens
agagagagagagaaaaaaga

SEQ ID NO: 5048 - DNA, 20 bp, Homo Sapiens
gagagagagagaaaaaagag

SEQ ID NO: 5049 - DNA, 20 bp, Homo Sapiens
agagagagagaaaaaagaga

SEQ ID NO: 5050 - DNA, 20 bp, Homo Sapiens
gagagagagaaaaaagagag

SEQ ID NO: 5051 - DNA, 20 bp, Homo Sapiens
agagagagaaaaaagagaga

SEQ ID NO: 5052 - DNA, 20 bp, Homo Sapiens
gagagagaaaaaagagagat

SEQ ID NO: 5053 - DNA, 20 bp, Homo Sapiens
agagagaaaaaagagagatc

SEQ ID NO: 5054 - DNA, 20 bp, Homo Sapiens
gagagaaaaaagagagatct

SEQ ID NO: 5055 - DNA, 20 bp, Homo Sapiens
agagaaaaaagagagatctt

SEQ ID NO: 5056 - DNA, 20 bp, Homo Sapiens
gagaaaaaagagagatcttg

SEQ ID NO: 5057 - DNA, 20 bp, Homo Sapiens
agaaaaaagagagatcttga

SEQ ID NO: 5058 - DNA, 20 bp, Homo Sapiens
gaaaaaagagagatcttgat

SEQ ID NO: 5059 - DNA, 20 bp, Homo Sapiens
aaaaaagagagatcttgatc

SEQ ID NO: 5060 - DNA, 20 bp, Homo Sapiens
aaaaagagagatcttgatcc

SEQ ID NO: 5061 - DNA, 20 bp, Homo Sapiens
aaaagagagatcttgatcca

SEQ ID NO: 5062 - DNA, 20 bp, Homo Sapiens
aaagagagatcttgatccac

SEQ ID NO: 5063 - DNA, 20 bp, Homo Sapiens
aagagagatcttgatccaca

SEQ ID NO: 5064 - DNA, 20 bp, Homo Sapiens
agagagatcttgatccacag

SEQ ID NO: 5065 - DNA, 20 bp, Homo Sapiens
gagagatcttgatccacaga

SEQ ID NO: 5066 - DNA, 20 bp, Homo Sapiens
agagatcttgatccacagaa

SEQ ID NO: 5067 - DNA, 20 bp, Homo Sapiens
gagatcttgatccacagaaa

SEQ ID NO: 5068 - DNA, 20 bp, Homo Sapiens
agatcttgatccacagaaat

SEQ ID NO: 5069 - DNA, 20 bp, Homo Sapiens
gatcttgatccacagaaata

SEQ ID NO: 5070 - DNA, 20 bp, Homo Sapiens
atcttgatccacagaaatac

SEQ ID NO: 5071 - DNA, 20 bp, Homo Sapiens
tcttgatccacagaaataca

SEQ ID NO: 5072 - DNA, 20 bp, Homo Sapiens
cttgatccacagaaatacat

SEQ ID NO: 5073 - DNA, 20 bp, Homo Sapiens
ttgatccacagaaatacatg

SEQ ID NO: 5074 - DNA, 20 bp, Homo Sapiens
tgatccacagaaatacatga

SEQ ID NO: 5075 - DNA, 20 bp, Homo Sapiens
gatccacagaaatacatgaa

SEQ ID NO: 5076 - DNA, 20 bp, Homo Sapiens
atccacagaaatacatgaaa

SEQ ID NO: 5077 - DNA, 20 bp, Homo Sapiens
tccacagaaatacatgaaat

SEQ ID NO: 5078 - DNA, 20 bp, Homo Sapiens
ccacagaaatacatgaaatg

SEQ ID NO: 5079 - DNA, 20 bp, Homo Sapiens
cacagaaatacatgaaatgt

SEQ ID NO: 5080 - DNA, 20 bp, Homo Sapiens
acagaaatacatgaaatgtc

SEQ ID NO: 5081 - DNA, 20 bp, Homo Sapiens
cagaaatacatgaaatgtct

SEQ ID NO: 5082 - DNA, 20 bp, Homo Sapiens
agaaatacatgaaatgtctg

SEQ ID NO: 5083 - DNA, 20 bp, Homo Sapiens
gaaatacatgaaatgtctgg

SEQ ID NO: 5084 - DNA, 20 bp, Homo Sapiens
aaatacatgaaatgtctggt

SEQ ID NO: 5085 - DNA, 20 bp, Homo Sapiens
aatacatgaaatgtctggtc

SEQ ID NO: 5086 - DNA, 20 bp, Homo Sapiens
atacatgaaatgtctggtct

SEQ ID NO: 5087 - DNA, 20 bp, Homo Sapiens
tacatgaaatgtctggtctg

SEQ ID NO: 5088 - DNA, 20 bp, Homo Sapiens
acatgaaatgtctggtctgt

SEQ ID NO: 5089 - DNA, 20 bp, Homo Sapiens
catgaaatgtctggtctgtc

SEQ ID NO: 5090 - DNA, 20 bp, Homo Sapiens
atgaaatgtctggtctgtcc

SEQ ID NO: 5091 - DNA, 20 bp, Homo Sapiens
tgaaatgtctggtctgtcca

SEQ ID NO: 5092 - DNA, 20 bp, Homo Sapiens
gaaatgtctggtctgtccac

SEQ ID NO: 5093 - DNA, 20 bp, Homo Sapiens
aaatgtctggtctgtccacc

SEQ ID NO: 5094 - DNA, 20 bp, Homo Sapiens
aatgtctggtctgtccaccc

SEQ ID NO: 5095 - DNA, 20 bp, Homo Sapiens
atgtctggtctgtccacccc

SEQ ID NO: 5096 - DNA, 20 bp, Homo Sapiens
tgtctggtctgtccacccca

SEQ ID NO: 5097 - DNA, 20 bp, Homo Sapiens
gtctggtctgtccaccccat

SEQ ID NO: 5098 - DNA, 20 bp, Homo Sapiens
tctggtctgtccaccccatc

SEQ ID NO: 5099 - DNA, 20 bp, Homo Sapiens
ctggtctgtccaccccatca

SEQ ID NO: 5100 - DNA, 20 bp, Homo Sapiens
tggtctgtccaccccatcaa

SEQ ID NO: 5101 - DNA, 20 bp, Homo Sapiens
ggtctgtccaccccatcaac

SEQ ID NO: 5102 - DNA, 20 bp, Homo Sapiens
gtctgtccaccccatcaaca

SEQ ID NO: 5103 - DNA, 20 bp, Homo Sapiens
tctgtccaccccatcaacaa

SEQ ID NO: 5104 - DNA, 20 bp, Homo Sapiens
ctgtccaccccatcaacaag

SEQ ID NO: 5105 - DNA, 20 bp, Homo Sapiens
tgtccaccccatcaacaagt

SEQ ID NO: 5106 - DNA, 20 bp, Homo Sapiens
gtccaccccatcaacaagtc

SEQ ID NO: 5107 - DNA, 20 bp, Homo Sapiens
tccaccccatcaacaagtct

SEQ ID NO: 5108 - DNA, 20 bp, Homo Sapiens
ccaccccatcaacaagtctt

SEQ ID NO: 5109 - DNA, 20 bp, Homo Sapiens
caccccatcaacaagtcttg

SEQ ID NO: 5110 - DNA, 20 bp, Homo Sapiens
accccatcaacaagtcttga

SEQ ID NO: 5111 - DNA, 20 bp, Homo Sapiens
ccccatcaacaagtcttgaa

SEQ ID NO: 5112 - DNA, 20 bp, Homo Sapiens
cccatcaacaagtcttgaaa

SEQ ID NO: 5113 - DNA, 20 bp, Homo Sapiens
ccatcaacaagtcttgaaac

SEQ ID NO: 5114 - DNA, 20 bp, Homo Sapiens
catcaacaagtcttgaaaca

SEQ ID NO: 5115 - DNA, 20 bp, Homo Sapiens
atcaacaagtcttgaaacaa

SEQ ID NO: 5116 - DNA, 20 bp, Homo Sapiens
tcaacaagtcttgaaacaag

SEQ ID NO: 5117 - DNA, 20 bp, Homo Sapiens
caacaagtcttgaaacaagc

SEQ ID NO: 5118 - DNA, 20 bp, Homo Sapiens
aacaagtcttgaaacaagca

SEQ ID NO: 5119 - DNA, 20 bp, Homo Sapiens
acaagtcttgaaacaagcaa

SEQ ID NO: 5120 - DNA, 20 bp, Homo Sapiens
caagtcttgaaacaagcaac

SEQ ID NO: 5121 - DNA, 20 bp, Homo Sapiens
aagtcttgaaacaagcaaca

SEQ ID NO: 5122 - DNA, 20 bp, Homo Sapiens
agtcttgaaacaagcaacag

SEQ ID NO: 5123 - DNA, 20 bp, Homo Sapiens
gtcttgaaacaagcaacaga

SEQ ID NO: 5124 - DNA, 20 bp, Homo Sapiens
tcttgaaacaagcaacagat

SEQ ID NO: 5125 - DNA, 20 bp, Homo Sapiens
cttgaaacaagcaacagatg

SEQ ID NO: 5126 - DNA, 20 bp, Homo Sapiens
ttgaaacaagcaacagatgg

SEQ ID NO: 5127 - DNA, 20 bp, Homo Sapiens
tgaaacaagcaacagatgga

SEQ ID NO: 5128 - DNA, 20 bp, Homo Sapiens
gaaacaagcaacagatggat

SEQ ID NO: 5129 - DNA, 20 bp, Homo Sapiens
aaacaagcaacagatggata

SEQ ID NO: 5130 - DNA, 20 bp, Homo Sapiens
aacaagcaacagatggatag

SEQ ID NO: 5131 - DNA, 20 bp, Homo Sapiens
acaagcaacagatggatagt

SEQ ID NO: 5132 - DNA, 20 bp, Homo Sapiens
caagcaacagatggatagtc

SEQ ID NO: 5133 - DNA, 20 bp, Homo Sapiens
aagcaacagatggatagtct

SEQ ID NO: 5134 - DNA, 20 bp, Homo Sapiens
agcaacagatggatagtctg

SEQ ID NO: 5135 - DNA, 20 bp, Homo Sapiens
gcaacagatggatagtctgt

SEQ ID NO: 5136 - DNA, 20 bp, Homo Sapiens
caacagatggatagtctgtc

SEQ ID NO: 5137 - DNA, 20 bp, Homo Sapiens
aacagatggatagtctgtcc

SEQ ID NO: 5138 - DNA, 20 bp, Homo Sapiens
acagatggatagtctgtcca

SEQ ID NO: 5139 - DNA, 20 bp, Homo Sapiens
cagatggatagtctgtccaa

SEQ ID NO: 5140 - DNA, 20 bp, Homo Sapiens
agatggatagtctgtccaaa

SEQ ID NO: 5141 - DNA, 20 bp, Homo Sapiens
gatggatagtctgtccaaat

SEQ ID NO: 5142 - DNA, 20 bp, Homo Sapiens
atggatagtctgtccaaatg

SEQ ID NO: 5143 - DNA, 20 bp, Homo Sapiens
tggatagtctgtccaaatgg

SEQ ID NO: 5144 - DNA, 20 bp, Homo Sapiens
ggatagtctgtccaaatgga

SEQ ID NO: 5145 - DNA, 20 bp, Homo Sapiens
gatagtctgtccaaatggac

SEQ ID NO: 5146 - DNA, 20 bp, Homo Sapiens
atagtctgtccaaatggaca

SEQ ID NO: 5147 - DNA, 20 bp, Homo Sapiens
tagtctgtccaaatggacat

SEQ ID NO: 5148 - DNA, 20 bp, Homo Sapiens
agtctgtccaaatggacata

SEQ ID NO: 5149 - DNA, 20 bp, Homo Sapiens
gtctgtccaaatggacataa

SEQ ID NO: 5150 - DNA, 20 bp, Homo Sapiens
tctgtccaaatggacataag

SEQ ID NO: 5151 - DNA, 20 bp, Homo Sapiens
ctgtccaaatggacataaga

SEQ ID NO: 5152 - DNA, 20 bp, Homo Sapiens
tgtccaaatggacataagac

SEQ ID NO: 5153 - DNA, 20 bp, Homo Sapiens
gtccaaatggacataagaca

SEQ ID NO: 5154 - DNA, 20 bp, Homo Sapiens
tccaaatggacataagacag

SEQ ID NO: 5155 - DNA, 20 bp, Homo Sapiens
ccaaatggacataagacaga

SEQ ID NO: 5156 - DNA, 20 bp, Homo Sapiens
caaatggacataagacagac

SEQ ID NO: 5157 - DNA, 20 bp, Homo Sapiens
aaatggacataagacagaca

SEQ ID NO: 5158 - DNA, 20 bp, Homo Sapiens
aatggacataagacagacag

SEQ ID NO: 5159 - DNA, 20 bp, Homo Sapiens
atggacataagacagacagc

SEQ ID NO: 5160 - DNA, 20 bp, Homo Sapiens
tggacataagacagacagca

SEQ ID NO: 5161 - DNA, 20 bp, Homo Sapiens
ggacataagacagacagcag

SEQ ID NO: 5162 - DNA, 20 bp, Homo Sapiens
gacataagacagacagcagt

SEQ ID NO: 5163 - DNA, 20 bp, Homo Sapiens
acataagacagacagcagtt

SEQ ID NO: 5164 - DNA, 20 bp, Homo Sapiens
cataagacagacagcagttt

SEQ ID NO: 5165 - DNA, 20 bp, Homo Sapiens
ataagacagacagcagtttc

SEQ ID NO: 5166 - DNA, 20 bp, Homo Sapiens
taagacagacagcagtttcc

SEQ ID NO: 5167 - DNA, 20 bp, Homo Sapiens
aagacagacagcagtttccc

SEQ ID NO: 5168 - DNA, 20 bp, Homo Sapiens
agacagacagcagtttccct

SEQ ID NO: 5169 - DNA, 20 bp, Homo Sapiens
gacagacagcagtttccctg

SEQ ID NO: 5170 - DNA, 20 bp, Homo Sapiens
acagacagcagtttccctgg

SEQ ID NO: 5171 - DNA, 20 bp, Homo Sapiens
cagacagcagtttccctggt

SEQ ID NO: 5172 - DNA, 20 bp, Homo Sapiens
agacagcagtttccctggtg

SEQ ID NO: 5173 - DNA, 20 bp, Homo Sapiens
gacagcagtttccctggtgg

SEQ ID NO: 5174 - DNA, 20 bp, Homo Sapiens
acagcagtttccctggtggt

SEQ ID NO: 5175 - DNA, 20 bp, Homo Sapiens
cagcagtttccctggtggtc

SEQ ID NO: 5176 - DNA, 20 bp, Homo Sapiens
agcagtttccctggtggtca

SEQ ID NO: 5177 - DNA, 20 bp, Homo Sapiens
gcagtttccctggtggtcag

SEQ ID NO: 5178 - DNA, 20 bp, Homo Sapiens
cagtttccctggtggtcagg

SEQ ID NO: 5179 - DNA, 20 bp, Homo Sapiens
agtttccctggtggtcaggg

SEQ ID NO: 5180 - DNA, 20 bp, Homo Sapiens
gtttccctggtggtcaggga

SEQ ID NO: 5181 - DNA, 20 bp, Homo Sapiens
tttccctggtggtcagggag

SEQ ID NO: 5182 - DNA, 20 bp, Homo Sapiens
ttccctggtggtcagggagg

SEQ ID NO: 5183 - DNA, 20 bp, Homo Sapiens
tccctggtggtcagggaggg

SEQ ID NO: 5184 - DNA, 20 bp, Homo Sapiens
ccctggtggtcagggagggg

SEQ ID NO: 5185 - DNA, 20 bp, Homo Sapiens
cctggtggtcagggaggggt

SEQ ID NO: 5186 - DNA, 20 bp, Homo Sapiens
ctggtggtcagggaggggtt

SEQ ID NO: 5187 - DNA, 20 bp, Homo Sapiens
tggtggtcagggaggggttt

SEQ ID NO: 5188 - DNA, 20 bp, Homo Sapiens
ggtggtcagggaggggtttt

SEQ ID NO: 5189 - DNA, 20 bp, Homo Sapiens
gtggtcagggaggggttttg

SEQ ID NO: 5190 - DNA, 20 bp, Homo Sapiens
tggtcagggaggggttttgg

SEQ ID NO: 5191 - DNA, 20 bp, Homo Sapiens
ggtcagggaggggttttggt

SEQ ID NO: 5192 - DNA, 20 bp, Homo Sapiens
gtcagggaggggttttggtg

SEQ ID NO: 5193 - DNA, 20 bp, Homo Sapiens
tcagggaggggttttggtga

SEQ ID NO: 5194 - DNA, 20 bp, Homo Sapiens
cagggaggggttttggtgat

SEQ ID NO: 5195 - DNA, 20 bp, Homo Sapiens
agggaggggttttggtgata

SEQ ID NO: 5196 - DNA, 20 bp, Homo Sapiens
gggaggggttttggtgatac

SEQ ID NO: 5197 - DNA, 20 bp, Homo Sapiens
ggaggggttttggtgatacc

SEQ ID NO: 5198 - DNA, 20 bp, Homo Sapiens
gaggggttttggtgataccc

SEQ ID NO: 5199 - DNA, 20 bp, Homo Sapiens
aggggttttggtgataccca

SEQ ID NO: 5200 - DNA, 20 bp, Homo Sapiens
ggggttttggtgatacccaa

SEQ ID NO: 5201 - DNA, 20 bp, Homo Sapiens
gggttttggtgatacccaag

SEQ ID NO: 5202 - DNA, 20 bp, Homo Sapiens
ggttttggtgatacccaagt

SEQ ID NO: 5203 - DNA, 20 bp, Homo Sapiens
gttttggtgatacccaagtt

SEQ ID NO: 5204 - DNA, 20 bp, Homo Sapiens
ttttggtgatacccaagtta

SEQ ID NO: 5205 - DNA, 20 bp, Homo Sapiens
tttggtgatacccaagttat

SEQ ID NO: 5206 - DNA, 20 bp, Homo Sapiens
ttggtgatacccaagttatt

SEQ ID NO: 5207 - DNA, 20 bp, Homo Sapiens
tggtgatacccaagttattg

SEQ ID NO: 5208 - DNA, 20 bp, Homo Sapiens
ggtgatacccaagttattgg

SEQ ID NO: 5209 - DNA, 20 bp, Homo Sapiens
gtgatacccaagttattggg

SEQ ID NO: 5210 - DNA, 20 bp, Homo Sapiens
tgatacccaagttattggga

SEQ ID NO: 5211 - DNA, 20 bp, Homo Sapiens
gatacccaagttattgggat

SEQ ID NO: 5212 - DNA, 20 bp, Homo Sapiens
atacccaagttattgggatg

SEQ ID NO: 5213 - DNA, 20 bp, Homo Sapiens
tacccaagttattgggatgt

SEQ ID NO: 5214 - DNA, 20 bp, Homo Sapiens
acccaagttattgggatgtc

SEQ ID NO: 5215 - DNA, 20 bp, Homo Sapiens
cccaagttattgggatgtca

SEQ ID NO: 5216 - DNA, 20 bp, Homo Sapiens
ccaagttattgggatgtcat

SEQ ID NO: 5217 - DNA, 20 bp, Homo Sapiens
caagttattgggatgtcatc

SEQ ID NO: 5218 - DNA, 20 bp, Homo Sapiens
aagttattgggatgtcatct

SEQ ID NO: 5219 - DNA, 20 bp, Homo Sapiens
agttattgggatgtcatctt

SEQ ID NO: 5220 - DNA, 20 bp, Homo Sapiens
gttattgggatgtcatcttc

SEQ ID NO: 5221 - DNA, 20 bp, Homo Sapiens
ttattgggatgtcatcttcc

SEQ ID NO: 5222 - DNA, 20 bp, Homo Sapiens
tattgggatgtcatcttcct

SEQ ID NO: 5223 - DNA, 20 bp, Homo Sapiens
attgggatgtcatcttcctg

SEQ ID NO: 5224 - DNA, 20 bp, Homo Sapiens
ttgggatgtcatcttcctgg

SEQ ID NO: 5225 - DNA, 20 bp, Homo Sapiens
tgggatgtcatcttcctgga

SEQ ID NO: 5226 - DNA, 20 bp, Homo Sapiens
gggatgtcatcttcctggaa

SEQ ID NO: 5227 - DNA, 20 bp, Homo Sapiens
ggatgtcatcttcctggaag

SEQ ID NO: 5228 - DNA, 20 bp, Homo Sapiens
gatgtcatcttcctggaagc

SEQ ID NO: 5229 - DNA, 20 bp, Homo Sapiens
atgtcatcttcctggaagca

SEQ ID NO: 5230 - DNA, 20 bp, Homo Sapiens
tgtcatcttcctggaagcag

SEQ ID NO: 5231 - DNA, 20 bp, Homo Sapiens
gtcatcttcctggaagcaga

SEQ ID NO: 5232 - DNA, 20 bp, Homo Sapiens
tcatcttcctggaagcagag

SEQ ID NO: 5233 - DNA, 20 bp, Homo Sapiens
catcttcctggaagcagagc

SEQ ID NO: 5234 - DNA, 20 bp, Homo Sapiens
atcttcctggaagcagagct

SEQ ID NO: 5235 - DNA, 20 bp, Homo Sapiens
tcttcctggaagcagagctg

SEQ ID NO: 5236 - DNA, 20 bp, Homo Sapiens
cttcctggaagcagagctgg

SEQ ID NO: 5237 - DNA, 20 bp, Homo Sapiens
ttcctggaagcagagctggg

SEQ ID NO: 5238 - DNA, 20 bp, Homo Sapiens
tcctggaagcagagctgggg

SEQ ID NO: 5239 - DNA, 20 bp, Homo Sapiens
cctggaagcagagctgggga

SEQ ID NO: 5240 - DNA, 20 bp, Homo Sapiens
ctggaagcagagctggggag

SEQ ID NO: 5241 - DNA, 20 bp, Homo Sapiens
tggaagcagagctggggagg

SEQ ID NO: 5242 - DNA, 20 bp, Homo Sapiens
ggaagcagagctggggaggg

SEQ ID NO: 5243 - DNA, 20 bp, Homo Sapiens
gaagcagagctggggaggga

SEQ ID NO: 5244 - DNA, 20 bp, Homo Sapiens
aagcagagctggggagggag

SEQ ID NO: 5245 - DNA, 20 bp, Homo Sapiens
agcagagctggggagggaga

SEQ ID NO: 5246 - DNA, 20 bp, Homo Sapiens
gcagagctggggagggagag

SEQ ID NO: 5247 - DNA, 20 bp, Homo Sapiens
cagagctggggagggagagc

SEQ ID NO: 5248 - DNA, 20 bp, Homo Sapiens
agagctggggagggagagcc

SEQ ID NO: 5249 - DNA, 20 bp, Homo Sapiens
gagctggggagggagagcca

SEQ ID NO: 5250 - DNA, 20 bp, Homo Sapiens
agctggggagggagagccat

SEQ ID NO: 5251 - DNA, 20 bp, Homo Sapiens
gctggggagggagagccatc

SEQ ID NO: 5252 - DNA, 20 bp, Homo Sapiens
ctggggagggagagccatca

SEQ ID NO: 5253 - DNA, 20 bp, Homo Sapiens
tggggagggagagccatcac

SEQ ID NO: 5254 - DNA, 20 bp, Homo Sapiens
ggggagggagagccatcacc

SEQ ID NO: 5255 - DNA, 20 bp, Homo Sapiens
gggagggagagccatcacct

SEQ ID NO: 5256 - DNA, 20 bp, Homo Sapiens
ggagggagagccatcacctt

SEQ ID NO: 5257 - DNA, 20 bp, Homo Sapiens
gagggagagccatcaccttg

SEQ ID NO: 5258 - DNA, 20 bp, Homo Sapiens
agggagagccatcaccttga

SEQ ID NO: 5259 - DNA, 20 bp, Homo Sapiens
gggagagccatcaccttgat

SEQ ID NO: 5260 - DNA, 20 bp, Homo Sapiens
ggagagccatcaccttgata

SEQ ID NO: 5261 - DNA, 20 bp, Homo Sapiens
gagagccatcaccttgataa

SEQ ID NO: 5262 - DNA, 20 bp, Homo Sapiens
agagccatcaccttgataat

SEQ ID NO: 5263 - DNA, 20 bp, Homo Sapiens
gagccatcaccttgataatg

SEQ ID NO: 5264 - DNA, 20 bp, Homo Sapiens
agccatcaccttgataatgg

SEQ ID NO: 5265 - DNA, 20 bp, Homo Sapiens
gccatcaccttgataatggg

SEQ ID NO: 5266 - DNA, 20 bp, Homo Sapiens
ccatcaccttgataatggga

SEQ ID NO: 5267 - DNA, 20 bp, Homo Sapiens
catcaccttgataatgggat

SEQ ID NO: 5268 - DNA, 20 bp, Homo Sapiens
atcaccttgataatgggatg

SEQ ID NO: 5269 - DNA, 20 bp, Homo Sapiens
tcaccttgataatgggatga

SEQ ID NO: 5270 - DNA, 20 bp, Homo Sapiens
caccttgataatgggatgaa

SEQ ID NO: 5271 - DNA, 20 bp, Homo Sapiens
accttgataatgggatgaat

SEQ ID NO: 5272 - DNA, 20 bp, Homo Sapiens
ccttgataatgggatgaatg

SEQ ID NO: 5273 - DNA, 20 bp, Homo Sapiens
cttgataatgggatgaatgg

SEQ ID NO: 5274 - DNA, 20 bp, Homo Sapiens
ttgataatgggatgaatgga

SEQ ID NO: 5275 - DNA, 20 bp, Homo Sapiens
tgataatgggatgaatggaa

SEQ ID NO: 5276 - DNA, 20 bp, Homo Sapiens
gataatgggatgaatggaag

SEQ ID NO: 5277 - DNA, 20 bp, Homo Sapiens
ataatgggatgaatggaagg

SEQ ID NO: 5278 - DNA, 20 bp, Homo Sapiens
taatgggatgaatggaagga

SEQ ID NO: 5279 - DNA, 20 bp, Homo Sapiens
aatgggatgaatggaaggag

SEQ ID NO: 5280 - DNA, 20 bp, Homo Sapiens
atgggatgaatggaaggagg

SEQ ID NO: 5281 - DNA, 20 bp, Homo Sapiens
tgggatgaatggaaggaggc

SEQ ID NO: 5282 - DNA, 20 bp, Homo Sapiens
gggatgaatggaaggaggct

SEQ ID NO: 5283 - DNA, 20 bp, Homo Sapiens
ggatgaatggaaggaggctt

SEQ ID NO: 5284 - DNA, 20 bp, Homo Sapiens
gatgaatggaaggaggctta

SEQ ID NO: 5285 - DNA, 20 bp, Homo Sapiens
atgaatggaaggaggcttag

SEQ ID NO: 5286 - DNA, 20 bp, Homo Sapiens
tgaatggaaggaggcttagg

SEQ ID NO: 5287 - DNA, 20 bp, Homo Sapiens
gaatggaaggaggcttagga

SEQ ID NO: 5288 - DNA, 20 bp, Homo Sapiens
aatggaaggaggcttaggac

SEQ ID NO: 5289 - DNA, 20 bp, Homo Sapiens
atggaaggaggcttaggact

SEQ ID NO: 5290 - DNA, 20 bp, Homo Sapiens
tggaaggaggcttaggactt

SEQ ID NO: 5291 - DNA, 20 bp, Homo Sapiens
ggaaggaggcttaggacttt

SEQ ID NO: 5292 - DNA, 20 bp, Homo Sapiens
gaaggaggcttaggactttc

SEQ ID NO: 5293 - DNA, 20 bp, Homo Sapiens
aaggaggcttaggactttcc

SEQ ID NO: 5294 - DNA, 20 bp, Homo Sapiens
aggaggcttaggactttcca

SEQ ID NO: 5295 - DNA, 20 bp, Homo Sapiens
ggaggcttaggactttccac

SEQ ID NO: 5296 - DNA, 20 bp, Homo Sapiens
gaggcttaggactttccact

SEQ ID NO: 5297 - DNA, 20 bp, Homo Sapiens
aggcttaggactttccactc

SEQ ID NO: 5298 - DNA, 20 bp, Homo Sapiens
ggcttaggactttccactcc

SEQ ID NO: 5299 - DNA, 20 bp, Homo Sapiens
gcttaggactttccactcct

SEQ ID NO: 5300 - DNA, 20 bp, Homo Sapiens
cttaggactttccactcctg

SEQ ID NO: 5301 - DNA, 20 bp, Homo Sapiens
ttaggactttccactcctgg

SEQ ID NO: 5302 - DNA, 20 bp, Homo Sapiens
taggactttccactcctggc

SEQ ID NO: 5303 - DNA, 20 bp, Homo Sapiens
aggactttccactcctggct

SEQ ID NO: 5304 - DNA, 20 bp, Homo Sapiens
ggactttccactcctggctg

SEQ ID NO: 5305 - DNA, 20 bp, Homo Sapiens
gactttccactcctggctga

SEQ ID NO: 5306 - DNA, 20 bp, Homo Sapiens
actttccactcctggctgag

SEQ ID NO: 5307 - DNA, 20 bp, Homo Sapiens
ctttccactcctggctgaga

SEQ ID NO: 5308 - DNA, 20 bp, Homo Sapiens
tttccactcctggctgagag

SEQ ID NO: 5309 - DNA, 20 bp, Homo Sapiens
ttccactcctggctgagaga

SEQ ID NO: 5310 - DNA, 20 bp, Homo Sapiens
tccactcctggctgagagag

SEQ ID NO: 5311 - DNA, 20 bp, Homo Sapiens
ccactcctggctgagagagg

SEQ ID NO: 5312 - DNA, 20 bp, Homo Sapiens
cactcctggctgagagagga

SEQ ID NO: 5313 - DNA, 20 bp, Homo Sapiens
actcctggctgagagaggaa

SEQ ID NO: 5314 - DNA, 20 bp, Homo Sapiens
ctcctggctgagagaggaag

SEQ ID NO: 5315 - DNA, 20 bp, Homo Sapiens
tcctggctgagagaggaaga

SEQ ID NO: 5316 - DNA, 20 bp, Homo Sapiens
cctggctgagagaggaagag

SEQ ID NO: 5317 - DNA, 20 bp, Homo Sapiens
ctggctgagagaggaagagc

SEQ ID NO: 5318 - DNA, 20 bp, Homo Sapiens
tggctgagagaggaagagct

SEQ ID NO: 5319 - DNA, 20 bp, Homo Sapiens
ggctgagagaggaagagctg

SEQ ID NO: 5320 - DNA, 20 bp, Homo Sapiens
gctgagagaggaagagctgc

SEQ ID NO: 5321 - DNA, 20 bp, Homo Sapiens
ctgagagaggaagagctgca

SEQ ID NO: 5322 - DNA, 20 bp, Homo Sapiens
tgagagaggaagagctgcaa

SEQ ID NO: 5323 - DNA, 20 bp, Homo Sapiens
gagagaggaagagctgcaac

SEQ ID NO: 5324 - DNA, 20 bp, Homo Sapiens
agagaggaagagctgcaacg

SEQ ID NO: 5325 - DNA, 20 bp, Homo Sapiens
gagaggaagagctgcaacgg

SEQ ID NO: 5326 - DNA, 20 bp, Homo Sapiens
agaggaagagctgcaacgga

SEQ ID NO: 5327 - DNA, 20 bp, Homo Sapiens
gaggaagagctgcaacggaa

SEQ ID NO: 5328 - DNA, 20 bp, Homo Sapiens
aggaagagctgcaacggaat

SEQ ID NO: 5329 - DNA, 20 bp, Homo Sapiens
ggaagagctgcaacggaatt

SEQ ID NO: 5330 - DNA, 20 bp, Homo Sapiens
gaagagctgcaacggaatta

SEQ ID NO: 5331 - DNA, 20 bp, Homo Sapiens
aagagctgcaacggaattag

SEQ ID NO: 5332 - DNA, 20 bp, Homo Sapiens
agagctgcaacggaattagg

SEQ ID NO: 5333 - DNA, 20 bp, Homo Sapiens
gagctgcaacggaattagga

SEQ ID NO: 5334 - DNA, 20 bp, Homo Sapiens
agctgcaacggaattaggaa

SEQ ID NO: 5335 - DNA, 20 bp, Homo Sapiens
gctgcaacggaattaggaag

SEQ ID NO: 5336 - DNA, 20 bp, Homo Sapiens
ctgcaacggaattaggaaga

SEQ ID NO: 5337 - DNA, 20 bp, Homo Sapiens
tgcaacggaattaggaagac

SEQ ID NO: 5338 - DNA, 20 bp, Homo Sapiens
gcaacggaattaggaagacc

SEQ ID NO: 5339 - DNA, 20 bp, Homo Sapiens
caacggaattaggaagacca

SEQ ID NO: 5340 - DNA, 20 bp, Homo Sapiens
aacggaattaggaagaccaa

SEQ ID NO: 5341 - DNA, 20 bp, Homo Sapiens
acggaattaggaagaccaag

SEQ ID NO: 5342 - DNA, 20 bp, Homo Sapiens
cggaattaggaagaccaaga

SEQ ID NO: 5343 - DNA, 20 bp, Homo Sapiens
ggaattaggaagaccaagac

SEQ ID NO: 5344 - DNA, 20 bp, Homo Sapiens
gaattaggaagaccaagaca

SEQ ID NO: 5345 - DNA, 20 bp, Homo Sapiens
aattaggaagaccaagacac

SEQ ID NO: 5346 - DNA, 20 bp, Homo Sapiens
attaggaagaccaagacaca

SEQ ID NO: 5347 - DNA, 20 bp, Homo Sapiens
ttaggaagaccaagacacag

SEQ ID NO: 5348 - DNA, 20 bp, Homo Sapiens
taggaagaccaagacacaga

SEQ ID NO: 5349 - DNA, 20 bp, Homo Sapiens
aggaagaccaagacacagat

SEQ ID NO: 5350 - DNA, 20 bp, Homo Sapiens
ggaagaccaagacacagatc

SEQ ID NO: 5351 - DNA, 20 bp, Homo Sapiens
gaagaccaagacacagatca

SEQ ID NO: 5352 - DNA, 20 bp, Homo Sapiens
aagaccaagacacagatcac

SEQ ID NO: 5353 - DNA, 20 bp, Homo Sapiens
agaccaagacacagatcacc

SEQ ID NO: 5354 - DNA, 20 bp, Homo Sapiens
gaccaagacacagatcaccc

SEQ ID NO: 5355 - DNA, 20 bp, Homo Sapiens
accaagacacagatcacccg

SEQ ID NO: 5356 - DNA, 20 bp, Homo Sapiens
ccaagacacagatcacccgg

SEQ ID NO: 5357 - DNA, 20 bp, Homo Sapiens
caagacacagatcacccggg

SEQ ID NO: 5358 - DNA, 20 bp, Homo Sapiens
aagacacagatcacccgggg

SEQ ID NO: 5359 - DNA, 20 bp, Homo Sapiens
agacacagatcacccggggc

SEQ ID NO: 5360 - DNA, 20 bp, Homo Sapiens
gacacagatcacccggggct

SEQ ID NO: 5361 - DNA, 20 bp, Homo Sapiens
acacagatcacccggggctt

SEQ ID NO: 5362 - DNA, 20 bp, Homo Sapiens
cacagatcacccggggctta

SEQ ID NO: 5363 - DNA, 20 bp, Homo Sapiens
acagatcacccggggcttac

SEQ ID NO: 5364 - DNA, 20 bp, Homo Sapiens
cagatcacccggggcttact

SEQ ID NO: 5365 - DNA, 20 bp, Homo Sapiens
agatcacccggggcttactt

SEQ ID NO: 5366 - DNA, 20 bp, Homo Sapiens
gatcacccggggcttactta

SEQ ID NO: 5367 - DNA, 20 bp, Homo Sapiens
atcacccggggcttacttag

SEQ ID NO: 5368 - DNA, 20 bp, Homo Sapiens
tcacccggggcttacttagc

SEQ ID NO: 5369 - DNA, 20 bp, Homo Sapiens
cacccggggcttacttagcc

SEQ ID NO: 5370 - DNA, 20 bp, Homo Sapiens
acccggggcttacttagcct

SEQ ID NO: 5371 - DNA, 20 bp, Homo Sapiens
cccggggcttacttagccta

SEQ ID NO: 5372 - DNA, 20 bp, Homo Sapiens
ccggggcttacttagcctac

SEQ ID NO: 5373 - DNA, 20 bp, Homo Sapiens
cggggcttacttagcctaca

SEQ ID NO: 5374 - DNA, 20 bp, Homo Sapiens
ggggcttacttagcctacag

SEQ ID NO: 5375 - DNA, 20 bp, Homo Sapiens
gggcttacttagcctacaga

SEQ ID NO: 5376 - DNA, 20 bp, Homo Sapiens
ggcttacttagcctacagat

SEQ ID NO: 5377 - DNA, 20 bp, Homo Sapiens
gcttacttagcctacagatg

SEQ ID NO: 5378 - DNA, 20 bp, Homo Sapiens
cttacttagcctacagatgt

SEQ ID NO: 5379 - DNA, 20 bp, Homo Sapiens
ttacttagcctacagatgtc

SEQ ID NO: 5380 - DNA, 20 bp, Homo Sapiens
tacttagcctacagatgtcc

SEQ ID NO: 5381 - DNA, 20 bp, Homo Sapiens
acttagcctacagatgtcct

SEQ ID NO: 5382 - DNA, 20 bp, Homo Sapiens
cttagcctacagatgtccta

SEQ ID NO: 5383 - DNA, 20 bp, Homo Sapiens
ttagcctacagatgtcctac

SEQ ID NO: 5384 - DNA, 20 bp, Homo Sapiens
tagcctacagatgtcctacg

SEQ ID NO: 5385 - DNA, 20 bp, Homo Sapiens
agcctacagatgtcctacgg

SEQ ID NO: 5386 - DNA, 20 bp, Homo Sapiens
gcctacagatgtcctacggg

SEQ ID NO: 5387 - DNA, 20 bp, Homo Sapiens
cctacagatgtcctacggga

SEQ ID NO: 5388 - DNA, 20 bp, Homo Sapiens
ctacagatgtcctacgggaa

SEQ ID NO: 5389 - DNA, 20 bp, Homo Sapiens
tacagatgtcctacgggaac

SEQ ID NO: 5390 - DNA, 20 bp, Homo Sapiens
acagatgtcctacgggaacg

SEQ ID NO: 5391 - DNA, 20 bp, Homo Sapiens
cagatgtcctacgggaacgt

SEQ ID NO: 5392 - DNA, 20 bp, Homo Sapiens
agatgtcctacgggaacgtg

SEQ ID NO: 5393 - DNA, 20 bp, Homo Sapiens
gatgtcctacgggaacgtgg

SEQ ID NO: 5394 - DNA, 20 bp, Homo Sapiens
atgtcctacgggaacgtggg

SEQ ID NO: 5395 - DNA, 20 bp, Homo Sapiens
tgtcctacgggaacgtgggc

SEQ ID NO: 5396 - DNA, 20 bp, Homo Sapiens
gtcctacgggaacgtgggct

SEQ ID NO: 5397 - DNA, 20 bp, Homo Sapiens
tcctacgggaacgtgggctg

SEQ ID NO: 5398 - DNA, 20 bp, Homo Sapiens
cctacgggaacgtgggctgg

SEQ ID NO: 5399 - DNA, 20 bp, Homo Sapiens
ctacgggaacgtgggctggc

SEQ ID NO: 5400 - DNA, 20 bp, Homo Sapiens
tacgggaacgtgggctggcc

SEQ ID NO: 5401 - DNA, 20 bp, Homo Sapiens
acgggaacgtgggctggccc

SEQ ID NO: 5402 - DNA, 20 bp, Homo Sapiens
cgggaacgtgggctggccca

SEQ ID NO: 5403 - DNA, 20 bp, Homo Sapiens
gggaacgtgggctggcccag

SEQ ID NO: 5404 - DNA, 20 bp, Homo Sapiens
ggaacgtgggctggcccagc

SEQ ID NO: 5405 - DNA, 20 bp, Homo Sapiens
gaacgtgggctggcccagca

SEQ ID NO: 5406 - DNA, 20 bp, Homo Sapiens
aacgtgggctggcccagcat

SEQ ID NO: 5407 - DNA, 20 bp, Homo Sapiens
acgtgggctggcccagcata

SEQ ID NO: 5408 - DNA, 20 bp, Homo Sapiens
cgtgggctggcccagcatag

SEQ ID NO: 5409 - DNA, 20 bp, Homo Sapiens
gtgggctggcccagcatagg

SEQ ID NO: 5410 - DNA, 20 bp, Homo Sapiens
tgggctggcccagcataggg

SEQ ID NO: 5411 - DNA, 20 bp, Homo Sapiens
gggctggcccagcatagggc

SEQ ID NO: 5412 - DNA, 20 bp, Homo Sapiens
ggctggcccagcatagggct

SEQ ID NO: 5413 - DNA, 20 bp, Homo Sapiens
gctggcccagcatagggcta

SEQ ID NO: 5414 - DNA, 20 bp, Homo Sapiens
ctggcccagcatagggctag

SEQ ID NO: 5415 - DNA, 20 bp, Homo Sapiens
tggcccagcatagggctagc

SEQ ID NO: 5416 - DNA, 20 bp, Homo Sapiens
ggcccagcatagggctagca

SEQ ID NO: 5417 - DNA, 20 bp, Homo Sapiens
gcccagcatagggctagcaa

SEQ ID NO: 5418 - DNA, 20 bp, Homo Sapiens
cccagcatagggctagcaaa

SEQ ID NO: 5419 - DNA, 20 bp, Homo Sapiens
ccagcatagggctagcaaat

SEQ ID NO: 5420 - DNA, 20 bp, Homo Sapiens
cagcatagggctagcaaatt

SEQ ID NO: 5421 - DNA, 20 bp, Homo Sapiens
agcatagggctagcaaattt

SEQ ID NO: 5422 - DNA, 20 bp, Homo Sapiens
gcatagggctagcaaatttg

SEQ ID NO: 5423 - DNA, 20 bp, Homo Sapiens
catagggctagcaaatttga

SEQ ID NO: 5424 - DNA, 20 bp, Homo Sapiens
atagggctagcaaatttgag

SEQ ID NO: 5425 - DNA, 20 bp, Homo Sapiens
tagggctagcaaatttgagt

SEQ ID NO: 5426 - DNA, 20 bp, Homo Sapiens
agggctagcaaatttgagtt

SEQ ID NO: 5427 - DNA, 20 bp, Homo Sapiens
gggctagcaaatttgagttg

SEQ ID NO: 5428 - DNA, 20 bp, Homo Sapiens
ggctagcaaatttgagttgg

SEQ ID NO: 5429 - DNA, 20 bp, Homo Sapiens
gctagcaaatttgagttgga

SEQ ID NO: 5430 - DNA, 20 bp, Homo Sapiens
ctagcaaatttgagttggat

SEQ ID NO: 5431 - DNA, 20 bp, Homo Sapiens
tagcaaatttgagttggatg

SEQ ID NO: 5432 - DNA, 20 bp, Homo Sapiens
agcaaatttgagttggatga

SEQ ID NO: 5433 - DNA, 20 bp, Homo Sapiens
gcaaatttgagttggatgat

SEQ ID NO: 5434 - DNA, 20 bp, Homo Sapiens
caaatttgagttggatgatt

SEQ ID NO: 5435 - DNA, 20 bp, Homo Sapiens
aaatttgagttggatgattg

SEQ ID NO: 5436 - DNA, 20 bp, Homo Sapiens
aatttgagttggatgattgt

SEQ ID NO: 5437 - DNA, 20 bp, Homo Sapiens
atttgagttggatgattgtt

SEQ ID NO: 5438 - DNA, 20 bp, Homo Sapiens
tttgagttggatgattgttt

SEQ ID NO: 5439 - DNA, 20 bp, Homo Sapiens
ttgagttggatgattgtttt

SEQ ID NO: 5440 - DNA, 20 bp, Homo Sapiens
tgagttggatgattgttttt

SEQ ID NO: 5441 - DNA, 20 bp, Homo Sapiens
gagttggatgattgtttttg

SEQ ID NO: 5442 - DNA, 20 bp, Homo Sapiens
agttggatgattgtttttgc

SEQ ID NO: 5443 - DNA, 20 bp, Homo Sapiens
gttggatgattgtttttgct

SEQ ID NO: 5444 - DNA, 20 bp, Homo Sapiens
ttggatgattgtttttgctc

SEQ ID NO: 5445 - DNA, 20 bp, Homo Sapiens
tggatgattgtttttgctca

SEQ ID NO: 5446 - DNA, 20 bp, Homo Sapiens
ggatgattgtttttgctcaa

SEQ ID NO: 5447 - DNA, 20 bp, Homo Sapiens
gatgattgtttttgctcaag

SEQ ID NO: 5448 - DNA, 20 bp, Homo Sapiens
atgattgtttttgctcaagg

SEQ ID NO: 5449 - DNA, 20 bp, Homo Sapiens
tgattgtttttgctcaaggc

SEQ ID NO: 5450 - DNA, 20 bp, Homo Sapiens
gattgtttttgctcaaggca

SEQ ID NO: 5451 - DNA, 20 bp, Homo Sapiens
attgtttttgctcaaggcaa

SEQ ID NO: 5452 - DNA, 20 bp, Homo Sapiens
ttgtttttgctcaaggcaac

SEQ ID NO: 5453 - DNA, 20 bp, Homo Sapiens
tgtttttgctcaaggcaacc

SEQ ID NO: 5454 - DNA, 20 bp, Homo Sapiens
gtttttgctcaaggcaacca

SEQ ID NO: 5455 - DNA, 20 bp, Homo Sapiens
tttttgctcaaggcaaccag

SEQ ID NO: 5456 - DNA, 20 bp, Homo Sapiens
ttttgctcaaggcaaccaga

SEQ ID NO: 5457 - DNA, 20 bp, Homo Sapiens
tttgctcaaggcaaccagag

SEQ ID NO: 5458 - DNA, 20 bp, Homo Sapiens
ttgctcaaggcaaccagagg

SEQ ID NO: 5459 - DNA, 20 bp, Homo Sapiens
tgctcaaggcaaccagagga

SEQ ID NO: 5460 - DNA, 20 bp, Homo Sapiens
gctcaaggcaaccagaggaa

SEQ ID NO: 5461 - DNA, 20 bp, Homo Sapiens
ctcaaggcaaccagaggaaa

SEQ ID NO: 5462 - DNA, 20 bp, Homo Sapiens
tcaaggcaaccagaggaaac

SEQ ID NO: 5463 - DNA, 20 bp, Homo Sapiens
caaggcaaccagaggaaact

SEQ ID NO: 5464 - DNA, 20 bp, Homo Sapiens
aaggcaaccagaggaaactt

SEQ ID NO: 5465 - DNA, 20 bp, Homo Sapiens
aggcaaccagaggaaacttg

SEQ ID NO: 5466 - DNA, 20 bp, Homo Sapiens
ggcaaccagaggaaacttgc

SEQ ID NO: 5467 - DNA, 20 bp, Homo Sapiens
gcaaccagaggaaacttgca

SEQ ID NO: 5468 - DNA, 20 bp, Homo Sapiens
caaccagaggaaacttgcat

SEQ ID NO: 5469 - DNA, 20 bp, Homo Sapiens
aaccagaggaaacttgcata

SEQ ID NO: 5470 - DNA, 20 bp, Homo Sapiens
accagaggaaacttgcatac

SEQ ID NO: 5471 - DNA, 20 bp, Homo Sapiens
ccagaggaaacttgcataca

SEQ ID NO: 5472 - DNA, 20 bp, Homo Sapiens
cagaggaaacttgcatacag

SEQ ID NO: 5473 - DNA, 20 bp, Homo Sapiens
agaggaaacttgcatacaga

SEQ ID NO: 5474 - DNA, 20 bp, Homo Sapiens
gaggaaacttgcatacagag

SEQ ID NO: 5475 - DNA, 20 bp, Homo Sapiens
aggaaacttgcatacagaga

SEQ ID NO: 5476 - DNA, 20 bp, Homo Sapiens
ggaaacttgcatacagagac

SEQ ID NO: 5477 - DNA, 20 bp, Homo Sapiens
gaaacttgcatacagagaca

SEQ ID NO: 5478 - DNA, 20 bp, Homo Sapiens
aaacttgcatacagagacag

SEQ ID NO: 5479 - DNA, 20 bp, Homo Sapiens
aacttgcatacagagacaga

SEQ ID NO: 5480 - DNA, 20 bp, Homo Sapiens
acttgcatacagagacagat

SEQ ID NO: 5481 - DNA, 20 bp, Homo Sapiens
cttgcatacagagacagata

SEQ ID NO: 5482 - DNA, 20 bp, Homo Sapiens
ttgcatacagagacagatat

SEQ ID NO: 5483 - DNA, 20 bp, Homo Sapiens
tgcatacagagacagatata

SEQ ID NO: 5484 - DNA, 20 bp, Homo Sapiens
gcatacagagacagatatac

SEQ ID NO: 5485 - DNA, 20 bp, Homo Sapiens
catacagagacagatatact

SEQ ID NO: 5486 - DNA, 20 bp, Homo Sapiens
atacagagacagatatactg

SEQ ID NO: 5487 - DNA, 20 bp, Homo Sapiens
tacagagacagatatactgg

SEQ ID NO: 5488 - DNA, 20 bp, Homo Sapiens
acagagacagatatactggg

SEQ ID NO: 5489 - DNA, 20 bp, Homo Sapiens
cagagacagatatactggga

SEQ ID NO: 5490 - DNA, 20 bp, Homo Sapiens
agagacagatatactgggag

SEQ ID NO: 5491 - DNA, 20 bp, Homo Sapiens
gagacagatatactgggaga

SEQ ID NO: 5492 - DNA, 20 bp, Homo Sapiens
agacagatatactgggagaa

SEQ ID NO: 5493 - DNA, 20 bp, Homo Sapiens
gacagatatactgggagaaa

SEQ ID NO: 5494 - DNA, 20 bp, Homo Sapiens
acagatatactgggagaaat

SEQ ID NO: 5495 - DNA, 20 bp, Homo Sapiens
cagatatactgggagaaatg

SEQ ID NO: 5496 - DNA, 20 bp, Homo Sapiens
agatatactgggagaaatga

SEQ ID NO: 5497 - DNA, 20 bp, Homo Sapiens
gatatactgggagaaatgac

SEQ ID NO: 5498 - DNA, 20 bp, Homo Sapiens
atatactgggagaaatgact

SEQ ID NO: 5499 - DNA, 20 bp, Homo Sapiens
tatactgggagaaatgactt

SEQ ID NO: 5500 - DNA, 20 bp, Homo Sapiens
atactgggagaaatgacttt

SEQ ID NO: 5501 - DNA, 20 bp, Homo Sapiens
tactgggagaaatgactttg

SEQ ID NO: 5502 - DNA, 20 bp, Homo Sapiens
actgggagaaatgactttga

SEQ ID NO: 5503 - DNA, 20 bp, Homo Sapiens
ctgggagaaatgactttgaa

SEQ ID NO: 5504 - DNA, 20 bp, Homo Sapiens
tgggagaaatgactttgaaa

SEQ ID NO: 5505 - DNA, 20 bp, Homo Sapiens
gggagaaatgactttgaaaa

SEQ ID NO: 5506 - DNA, 20 bp, Homo Sapiens
ggagaaatgactttgaaaac

SEQ ID NO: 5507 - DNA, 20 bp, Homo Sapiens
gagaaatgactttgaaaacc

SEQ ID NO: 5508 - DNA, 20 bp, Homo Sapiens
agaaatgactttgaaaacct

SEQ ID NO: 5509 - DNA, 20 bp, Homo Sapiens
gaaatgactttgaaaacctg

SEQ ID NO: 5510 - DNA, 20 bp, Homo Sapiens
aaatgactttgaaaacctgg

SEQ ID NO: 5511 - DNA, 20 bp, Homo Sapiens
aatgactttgaaaacctggc

SEQ ID NO: 5512 - DNA, 20 bp, Homo Sapiens
atgactttgaaaacctggct

SEQ ID NO: 5513 - DNA, 20 bp, Homo Sapiens
tgactttgaaaacctggctc

SEQ ID NO: 5514 - DNA, 20 bp, Homo Sapiens
gactttgaaaacctggctct

SEQ ID NO: 5515 - DNA, 20 bp, Homo Sapiens
actttgaaaacctggctcta

SEQ ID NO: 5516 - DNA, 20 bp, Homo Sapiens
ctttgaaaacctggctctaa

SEQ ID NO: 5517 - DNA, 20 bp, Homo Sapiens
tttgaaaacctggctctaag

SEQ ID NO: 5518 - DNA, 20 bp, Homo Sapiens
ttgaaaacctggctctaagg

SEQ ID NO: 5519 - DNA, 20 bp, Homo Sapiens
tgaaaacctggctctaaggt

SEQ ID NO: 5520 - DNA, 20 bp, Homo Sapiens
gaaaacctggctctaaggtg

SEQ ID NO: 5521 - DNA, 20 bp, Homo Sapiens
aaaacctggctctaaggtgg

SEQ ID NO: 5522 - DNA, 20 bp, Homo Sapiens
aaacctggctctaaggtggg

SEQ ID NO: 5523 - DNA, 20 bp, Homo Sapiens
aacctggctctaaggtggga

SEQ ID NO: 5524 - DNA, 20 bp, Homo Sapiens
acctggctctaaggtgggat

SEQ ID NO: 5525 - DNA, 20 bp, Homo Sapiens
cctggctctaaggtgggatc

SEQ ID NO: 5526 - DNA, 20 bp, Homo Sapiens
ctggctctaaggtgggatca

SEQ ID NO: 5527 - DNA, 20 bp, Homo Sapiens
tggctctaaggtgggatcac

SEQ ID NO: 5528 - DNA, 20 bp, Homo Sapiens
ggctctaaggtgggatcact

SEQ ID NO: 5529 - DNA, 20 bp, Homo Sapiens
gctctaaggtgggatcacta

SEQ ID NO: 5530 - DNA, 20 bp, Homo Sapiens
ctctaaggtgggatcactaa

SEQ ID NO: 5531 - DNA, 20 bp, Homo Sapiens
tctaaggtgggatcactaag

SEQ ID NO: 5532 - DNA, 20 bp, Homo Sapiens
ctaaggtgggatcactaagg

SEQ ID NO: 5533 - DNA, 20 bp, Homo Sapiens
taaggtgggatcactaaggg

SEQ ID NO: 5534 - DNA, 20 bp, Homo Sapiens
aaggtgggatcactaaggga

SEQ ID NO: 5535 - DNA, 20 bp, Homo Sapiens
aggtgggatcactaagggat

SEQ ID NO: 5536 - DNA, 20 bp, Homo Sapiens
ggtgggatcactaagggatg

SEQ ID NO: 5537 - DNA, 20 bp, Homo Sapiens
gtgggatcactaagggatgg

SEQ ID NO: 5538 - DNA, 20 bp, Homo Sapiens
tgggatcactaagggatggg

SEQ ID NO: 5539 - DNA, 20 bp, Homo Sapiens
gggatcactaagggatgggg

SEQ ID NO: 5540 - DNA, 20 bp, Homo Sapiens
ggatcactaagggatggggc

SEQ ID NO: 5541 - DNA, 20 bp, Homo Sapiens
gatcactaagggatggggca

SEQ ID NO: 5542 - DNA, 20 bp, Homo Sapiens
atcactaagggatggggcag

SEQ ID NO: 5543 - DNA, 20 bp, Homo Sapiens
tcactaagggatggggcagt

SEQ ID NO: 5544 - DNA, 20 bp, Homo Sapiens
cactaagggatggggcagtc

SEQ ID NO: 5545 - DNA, 20 bp, Homo Sapiens
actaagggatggggcagtct

SEQ ID NO: 5546 - DNA, 20 bp, Homo Sapiens
ctaagggatggggcagtctc

SEQ ID NO: 5547 - DNA, 20 bp, Homo Sapiens
taagggatggggcagtctct

SEQ ID NO: 5548 - DNA, 20 bp, Homo Sapiens
aagggatggggcagtctctg

SEQ ID NO: 5549 - DNA, 20 bp, Homo Sapiens
agggatggggcagtctctgc

SEQ ID NO: 5550 - DNA, 20 bp, Homo Sapiens
gggatggggcagtctctgcc

SEQ ID NO: 5551 - DNA, 20 bp, Homo Sapiens
ggatggggcagtctctgccc

SEQ ID NO: 5552 - DNA, 20 bp, Homo Sapiens
gatggggcagtctctgccca

SEQ ID NO: 5553 - DNA, 20 bp, Homo Sapiens
atggggcagtctctgcccaa

SEQ ID NO: 5554 - DNA, 20 bp, Homo Sapiens
tggggcagtctctgcccaaa

SEQ ID NO: 5555 - DNA, 20 bp, Homo Sapiens
ggggcagtctctgcccaaac

SEQ ID NO: 5556 - DNA, 20 bp, Homo Sapiens
gggcagtctctgcccaaaca

SEQ ID NO: 5557 - DNA, 20 bp, Homo Sapiens
ggcagtctctgcccaaacat

SEQ ID NO: 5558 - DNA, 20 bp, Homo Sapiens
gcagtctctgcccaaacata

SEQ ID NO: 5559 - DNA, 20 bp, Homo Sapiens
cagtctctgcccaaacataa

SEQ ID NO: 5560 - DNA, 20 bp, Homo Sapiens
agtctctgcccaaacataaa

SEQ ID NO: 5561 - DNA, 20 bp, Homo Sapiens
gtctctgcccaaacataaag

SEQ ID NO: 5562 - DNA, 20 bp, Homo Sapiens
tctctgcccaaacataaaga

SEQ ID NO: 5563 - DNA, 20 bp, Homo Sapiens
ctctgcccaaacataaagag

SEQ ID NO: 5564 - DNA, 20 bp, Homo Sapiens
tctgcccaaacataaagaga

SEQ ID NO: 5565 - DNA, 20 bp, Homo Sapiens
ctgcccaaacataaagagaa

SEQ ID NO: 5566 - DNA, 20 bp, Homo Sapiens
tgcccaaacataaagagaac

SEQ ID NO: 5567 - DNA, 20 bp, Homo Sapiens
gcccaaacataaagagaact

SEQ ID NO: 5568 - DNA, 20 bp, Homo Sapiens
cccaaacataaagagaactc

SEQ ID NO: 5569 - DNA, 20 bp, Homo Sapiens
ccaaacataaagagaactct

SEQ ID NO: 5570 - DNA, 20 bp, Homo Sapiens
caaacataaagagaactctg

SEQ ID NO: 5571 - DNA, 20 bp, Homo Sapiens
aaacataaagagaactctgg

SEQ ID NO: 5572 - DNA, 20 bp, Homo Sapiens
aacataaagagaactctggg

SEQ ID NO: 5573 - DNA, 20 bp, Homo Sapiens
acataaagagaactctgggg

SEQ ID NO: 5574 - DNA, 20 bp, Homo Sapiens
cataaagagaactctgggga

SEQ ID NO: 5575 - DNA, 20 bp, Homo Sapiens
ataaagagaactctggggag

SEQ ID NO: 5576 - DNA, 20 bp, Homo Sapiens
taaagagaactctggggagc

SEQ ID NO: 5577 - DNA, 20 bp, Homo Sapiens
aaagagaactctggggagcc

SEQ ID NO: 5578 - DNA, 20 bp, Homo Sapiens
aagagaactctggggagcct

SEQ ID NO: 5579 - DNA, 20 bp, Homo Sapiens
agagaactctggggagcctg

SEQ ID NO: 5580 - DNA, 20 bp, Homo Sapiens
gagaactctggggagcctga

SEQ ID NO: 5581 - DNA, 20 bp, Homo Sapiens
agaactctggggagcctgag

SEQ ID NO: 5582 - DNA, 20 bp, Homo Sapiens
gaactctggggagcctgagc

SEQ ID NO: 5583 - DNA, 20 bp, Homo Sapiens
aactctggggagcctgagcc

SEQ ID NO: 5584 - DNA, 20 bp, Homo Sapiens
actctggggagcctgagcca

SEQ ID NO: 5585 - DNA, 20 bp, Homo Sapiens
ctctggggagcctgagccac

SEQ ID NO: 5586 - DNA, 20 bp, Homo Sapiens
tctggggagcctgagccaca

SEQ ID NO: 5587 - DNA, 20 bp, Homo Sapiens
ctggggagcctgagccacaa

SEQ ID NO: 5588 - DNA, 20 bp, Homo Sapiens
tggggagcctgagccacaaa

SEQ ID NO: 5589 - DNA, 20 bp, Homo Sapiens
ggggagcctgagccacaaaa

SEQ ID NO: 5590 - DNA, 20 bp, Homo Sapiens
gggagcctgagccacaaaaa

SEQ ID NO: 5591 - DNA, 20 bp, Homo Sapiens
ggagcctgagccacaaaaat

SEQ ID NO: 5592 - DNA, 20 bp, Homo Sapiens
gagcctgagccacaaaaatg

SEQ ID NO: 5593 - DNA, 20 bp, Homo Sapiens
agcctgagccacaaaaatgt

SEQ ID NO: 5594 - DNA, 20 bp, Homo Sapiens
gcctgagccacaaaaatgtt

SEQ ID NO: 5595 - DNA, 20 bp, Homo Sapiens
cctgagccacaaaaatgttc

SEQ ID NO: 5596 - DNA, 20 bp, Homo Sapiens
ctgagccacaaaaatgttcc

SEQ ID NO: 5597 - DNA, 20 bp, Homo Sapiens
tgagccacaaaaatgttcct

SEQ ID NO: 5598 - DNA, 20 bp, Homo Sapiens
gagccacaaaaatgttcctt

SEQ ID NO: 5599 - DNA, 20 bp, Homo Sapiens
agccacaaaaatgttccttt

SEQ ID NO: 5600 - DNA, 20 bp, Homo Sapiens
gccacaaaaatgttccttta

SEQ ID NO: 5601 - DNA, 20 bp, Homo Sapiens
ccacaaaaatgttcctttat

SEQ ID NO: 5602 - DNA, 20 bp, Homo Sapiens
cacaaaaatgttcctttatt

SEQ ID NO: 5603 - DNA, 20 bp, Homo Sapiens
acaaaaatgttcctttattt

SEQ ID NO: 5604 - DNA, 20 bp, Homo Sapiens
caaaaatgttcctttatttt

SEQ ID NO: 5605 - DNA, 20 bp, Homo Sapiens
aaaaatgttcctttatttta

SEQ ID NO: 5606 - DNA, 20 bp, Homo Sapiens
aaaatgttcctttattttat

SEQ ID NO: 5607 - DNA, 20 bp, Homo Sapiens
aaatgttcctttattttatg

SEQ ID NO: 5608 - DNA, 20 bp, Homo Sapiens
aatgttcctttattttatgt

SEQ ID NO: 5609 - DNA, 20 bp, Homo Sapiens
atgttcctttattttatgta

SEQ ID NO: 5610 - DNA, 20 bp, Homo Sapiens
tgttcctttattttatgtaa

SEQ ID NO: 5611 - DNA, 20 bp, Homo Sapiens
gttcctttattttatgtaaa

SEQ ID NO: 5612 - DNA, 20 bp, Homo Sapiens
ttcctttattttatgtaaac

SEQ ID NO: 5613 - DNA, 20 bp, Homo Sapiens
tcctttattttatgtaaacc

SEQ ID NO: 5614 - DNA, 20 bp, Homo Sapiens
cctttattttatgtaaaccc

SEQ ID NO: 5615 - DNA, 20 bp, Homo Sapiens
ctttattttatgtaaaccct

SEQ ID NO: 5616 - DNA, 20 bp, Homo Sapiens
tttattttatgtaaaccctc

SEQ ID NO: 5617 - DNA, 20 bp, Homo Sapiens
ttattttatgtaaaccctca

SEQ ID NO: 5618 - DNA, 20 bp, Homo Sapiens
tattttatgtaaaccctcaa

SEQ ID NO: 5619 - DNA, 20 bp, Homo Sapiens
attttatgtaaaccctcaag

SEQ ID NO: 5620 - DNA, 20 bp, Homo Sapiens
ttttatgtaaaccctcaagg

SEQ ID NO: 5621 - DNA, 20 bp, Homo Sapiens
tttatgtaaaccctcaaggg

SEQ ID NO: 5622 - DNA, 20 bp, Homo Sapiens
ttatgtaaaccctcaagggt

SEQ ID NO: 5623 - DNA, 20 bp, Homo Sapiens
tatgtaaaccctcaagggtt

SEQ ID NO: 5624 - DNA, 20 bp, Homo Sapiens
atgtaaaccctcaagggtta

SEQ ID NO: 5625 - DNA, 20 bp, Homo Sapiens
tgtaaaccctcaagggttat

SEQ ID NO: 5626 - DNA, 20 bp, Homo Sapiens
gtaaaccctcaagggttata

SEQ ID NO: 5627 - DNA, 20 bp, Homo Sapiens
taaaccctcaagggttatag

SEQ ID NO: 5628 - DNA, 20 bp, Homo Sapiens
aaaccctcaagggttataga

SEQ ID NO: 5629 - DNA, 20 bp, Homo Sapiens
aaccctcaagggttatagac

SEQ ID NO: 5630 - DNA, 20 bp, Homo Sapiens
accctcaagggttatagact

SEQ ID NO: 5631 - DNA, 20 bp, Homo Sapiens
ccctcaagggttatagactg

SEQ ID NO: 5632 - DNA, 20 bp, Homo Sapiens
cctcaagggttatagactgc

SEQ ID NO: 5633 - DNA, 20 bp, Homo Sapiens
ctcaagggttatagactgcc

SEQ ID NO: 5634 - DNA, 20 bp, Homo Sapiens
tcaagggttatagactgcca

SEQ ID NO: 5635 - DNA, 20 bp, Homo Sapiens
caagggttatagactgccat

SEQ ID NO: 5636 - DNA, 20 bp, Homo Sapiens
aagggttatagactgccatg

SEQ ID NO: 5637 - DNA, 20 bp, Homo Sapiens
agggttatagactgccatgc

SEQ ID NO: 5638 - DNA, 20 bp, Homo Sapiens
gggttatagactgccatgct

SEQ ID NO: 5639 - DNA, 20 bp, Homo Sapiens
ggttatagactgccatgcta

SEQ ID NO: 5640 - DNA, 20 bp, Homo Sapiens
gttatagactgccatgctag

SEQ ID NO: 5641 - DNA, 20 bp, Homo Sapiens
ttatagactgccatgctaga

SEQ ID NO: 5642 - DNA, 20 bp, Homo Sapiens
tatagactgccatgctagac

SEQ ID NO: 5643 - DNA, 20 bp, Homo Sapiens
atagactgccatgctagaca

SEQ ID NO: 5644 - DNA, 20 bp, Homo Sapiens
tagactgccatgctagacaa

SEQ ID NO: 5645 - DNA, 20 bp, Homo Sapiens
agactgccatgctagacaag

SEQ ID NO: 5646 - DNA, 20 bp, Homo Sapiens
gactgccatgctagacaagc

SEQ ID NO: 5647 - DNA, 20 bp, Homo Sapiens
actgccatgctagacaagct

SEQ ID NO: 5648 - DNA, 20 bp, Homo Sapiens
ctgccatgctagacaagctt

SEQ ID NO: 5649 - DNA, 20 bp, Homo Sapiens
tgccatgctagacaagcttg

SEQ ID NO: 5650 - DNA, 20 bp, Homo Sapiens
gccatgctagacaagcttgt

SEQ ID NO: 5651 - DNA, 20 bp, Homo Sapiens
ccatgctagacaagcttgtc

SEQ ID NO: 5652 - DNA, 20 bp, Homo Sapiens
catgctagacaagcttgtcc

SEQ ID NO: 5653 - DNA, 20 bp, Homo Sapiens
atgctagacaagcttgtcca

SEQ ID NO: 5654 - DNA, 20 bp, Homo Sapiens
tgctagacaagcttgtccat

SEQ ID NO: 5655 - DNA, 20 bp, Homo Sapiens
gctagacaagcttgtccatg

SEQ ID NO: 5656 - DNA, 20 bp, Homo Sapiens
ctagacaagcttgtccatgt

SEQ ID NO: 5657 - DNA, 20 bp, Homo Sapiens
tagacaagcttgtccatgta

SEQ ID NO: 5658 - DNA, 20 bp, Homo Sapiens
agacaagcttgtccatgtaa

SEQ ID NO: 5659 - DNA, 20 bp, Homo Sapiens
gacaagcttgtccatgtaat

SEQ ID NO: 5660 - DNA, 20 bp, Homo Sapiens
acaagcttgtccatgtaata

SEQ ID NO: 5661 - DNA, 20 bp, Homo Sapiens
caagcttgtccatgtaatat

SEQ ID NO: 5662 - DNA, 20 bp, Homo Sapiens
aagcttgtccatgtaatatt

SEQ ID NO: 5663 - DNA, 20 bp, Homo Sapiens
agcttgtccatgtaatattc

SEQ ID NO: 5664 - DNA, 20 bp, Homo Sapiens
gcttgtccatgtaatattcc

SEQ ID NO: 5665 - DNA, 20 bp, Homo Sapiens
cttgtccatgtaatattccc

SEQ ID NO: 5666 - DNA, 20 bp, Homo Sapiens
ttgtccatgtaatattccca

SEQ ID NO: 5667 - DNA, 20 bp, Homo Sapiens
tgtccatgtaatattcccat

SEQ ID NO: 5668 - DNA, 20 bp, Homo Sapiens
gtccatgtaatattcccatg

SEQ ID NO: 5669 - DNA, 20 bp, Homo Sapiens
tccatgtaatattcccatgt

SEQ ID NO: 5670 - DNA, 20 bp, Homo Sapiens
ccatgtaatattcccatgtt

SEQ ID NO: 5671 - DNA, 20 bp, Homo Sapiens
catgtaatattcccatgttt

SEQ ID NO: 5672 - DNA, 20 bp, Homo Sapiens
atgtaatattcccatgtttt

SEQ ID NO: 5673 - DNA, 20 bp, Homo Sapiens
tgtaatattcccatgttttt

SEQ ID NO: 5674 - DNA, 20 bp, Homo Sapiens
gtaatattcccatgttttta

SEQ ID NO: 5675 - DNA, 20 bp, Homo Sapiens
taatattcccatgtttttac

SEQ ID NO: 5676 - DNA, 20 bp, Homo Sapiens
aatattcccatgtttttacc

SEQ ID NO: 5677 - DNA, 20 bp, Homo Sapiens
atattcccatgtttttaccc

SEQ ID NO: 5678 - DNA, 20 bp, Homo Sapiens
tattcccatgtttttaccct

SEQ ID NO: 5679 - DNA, 20 bp, Homo Sapiens
attcccatgtttttaccctg

SEQ ID NO: 5680 - DNA, 20 bp, Homo Sapiens
ttcccatgtttttaccctgc

SEQ ID NO: 5681 - DNA, 20 bp, Homo Sapiens
tcccatgtttttaccctgcc

SEQ ID NO: 5682 - DNA, 20 bp, Homo Sapiens
cccatgtttttaccctgccc

SEQ ID NO: 5683 - DNA, 20 bp, Homo Sapiens
ccatgtttttaccctgcccc

SEQ ID NO: 5684 - DNA, 20 bp, Homo Sapiens
catgtttttaccctgcccct

SEQ ID NO: 5685 - DNA, 20 bp, Homo Sapiens
atgtttttaccctgcccctg

SEQ ID NO: 5686 - DNA, 20 bp, Homo Sapiens
tgtttttaccctgcccctgc

SEQ ID NO: 5687 - DNA, 20 bp, Homo Sapiens
gtttttaccctgcccctgcc

SEQ ID NO: 5688 - DNA, 20 bp, Homo Sapiens
tttttaccctgcccctgcct

SEQ ID NO: 5689 - DNA, 20 bp, Homo Sapiens
ttttaccctgcccctgcctt

SEQ ID NO: 5690 - DNA, 20 bp, Homo Sapiens
tttaccctgcccctgccttg

SEQ ID NO: 5691 - DNA, 20 bp, Homo Sapiens
ttaccctgcccctgccttga

SEQ ID NO: 5692 - DNA, 20 bp, Homo Sapiens
taccctgcccctgccttgat

SEQ ID NO: 5693 - DNA, 20 bp, Homo Sapiens
accctgcccctgccttgatt

SEQ ID NO: 5694 - DNA, 20 bp, Homo Sapiens
ccctgcccctgccttgatta

SEQ ID NO: 5695 - DNA, 20 bp, Homo Sapiens
cctgcccctgccttgattag

SEQ ID NO: 5696 - DNA, 20 bp, Homo Sapiens
ctgcccctgccttgattaga

SEQ ID NO: 5697 - DNA, 20 bp, Homo Sapiens
tgcccctgccttgattagac

SEQ ID NO: 5698 - DNA, 20 bp, Homo Sapiens
gcccctgccttgattagact

SEQ ID NO: 5699 - DNA, 20 bp, Homo Sapiens
cccctgccttgattagactc

SEQ ID NO: 5700 - DNA, 20 bp, Homo Sapiens
ccctgccttgattagactcc

SEQ ID NO: 5701 - DNA, 20 bp, Homo Sapiens
cctgccttgattagactcct

SEQ ID NO: 5702 - DNA, 20 bp, Homo Sapiens
ctgccttgattagactccta

SEQ ID NO: 5703 - DNA, 20 bp, Homo Sapiens
tgccttgattagactcctag

SEQ ID NO: 5704 - DNA, 20 bp, Homo Sapiens
gccttgattagactcctagc

SEQ ID NO: 5705 - DNA, 20 bp, Homo Sapiens
ccttgattagactcctagca

SEQ ID NO: 5706 - DNA, 20 bp, Homo Sapiens
cttgattagactcctagcac

SEQ ID NO: 5707 - DNA, 20 bp, Homo Sapiens
ttgattagactcctagcacc

SEQ ID NO: 5708 - DNA, 20 bp, Homo Sapiens
tgattagactcctagcacct

SEQ ID NO: 5709 - DNA, 20 bp, Homo Sapiens
gattagactcctagcacctg

SEQ ID NO: 5710 - DNA, 20 bp, Homo Sapiens
attagactcctagcacctgg

SEQ ID NO: 5711 - DNA, 20 bp, Homo Sapiens
ttagactcctagcacctggc

SEQ ID NO: 5712 - DNA, 20 bp, Homo Sapiens
tagactcctagcacctggct

SEQ ID NO: 5713 - DNA, 20 bp, Homo Sapiens
agactcctagcacctggcta

SEQ ID NO: 5714 - DNA, 20 bp, Homo Sapiens
gactcctagcacctggctag

SEQ ID NO: 5715 - DNA, 20 bp, Homo Sapiens
actcctagcacctggctagt

SEQ ID NO: 5716 - DNA, 20 bp, Homo Sapiens
ctcctagcacctggctagtt

SEQ ID NO: 5717 - DNA, 20 bp, Homo Sapiens
tcctagcacctggctagttt

SEQ ID NO: 5718 - DNA, 20 bp, Homo Sapiens
cctagcacctggctagtttc

SEQ ID NO: 5719 - DNA, 20 bp, Homo Sapiens
ctagcacctggctagtttct

SEQ ID NO: 5720 - DNA, 20 bp, Homo Sapiens
tagcacctggctagtttcta

SEQ ID NO: 5721 - DNA, 20 bp, Homo Sapiens
agcacctggctagtttctaa

SEQ ID NO: 5722 - DNA, 20 bp, Homo Sapiens
gcacctggctagtttctaac

SEQ ID NO: 5723 - DNA, 20 bp, Homo Sapiens
cacctggctagtttctaaca

SEQ ID NO: 5724 - DNA, 20 bp, Homo Sapiens
acctggctagtttctaacat

SEQ ID NO: 5725 - DNA, 20 bp, Homo Sapiens
cctggctagtttctaacatg

SEQ ID NO: 5726 - DNA, 20 bp, Homo Sapiens
ctggctagtttctaacatgt

SEQ ID NO: 5727 - DNA, 20 bp, Homo Sapiens
tggctagtttctaacatgtt

SEQ ID NO: 5728 - DNA, 20 bp, Homo Sapiens
ggctagtttctaacatgttt

SEQ ID NO: 5729 - DNA, 20 bp, Homo Sapiens
gctagtttctaacatgtttt

SEQ ID NO: 5730 - DNA, 20 bp, Homo Sapiens
ctagtttctaacatgttttg

SEQ ID NO: 5731 - DNA, 20 bp, Homo Sapiens
tagtttctaacatgttttgt

SEQ ID NO: 5732 - DNA, 20 bp, Homo Sapiens
agtttctaacatgttttgtg

SEQ ID NO: 5733 - DNA, 20 bp, Homo Sapiens
gtttctaacatgttttgtgc

SEQ ID NO: 5734 - DNA, 20 bp, Homo Sapiens
tttctaacatgttttgtgca

SEQ ID NO: 5735 - DNA, 20 bp, Homo Sapiens
ttctaacatgttttgtgcag

SEQ ID NO: 5736 - DNA, 20 bp, Homo Sapiens
tctaacatgttttgtgcagc

SEQ ID NO: 5737 - DNA, 20 bp, Homo Sapiens
ctaacatgttttgtgcagca

SEQ ID NO: 5738 - DNA, 20 bp, Homo Sapiens
taacatgttttgtgcagcac

SEQ ID NO: 5739 - DNA, 20 bp, Homo Sapiens
aacatgttttgtgcagcaca

SEQ ID NO: 5740 - DNA, 20 bp, Homo Sapiens
acatgttttgtgcagcacag

SEQ ID NO: 5741 - DNA, 20 bp, Homo Sapiens
catgttttgtgcagcacagt

SEQ ID NO: 5742 - DNA, 20 bp, Homo Sapiens
atgttttgtgcagcacagtt

SEQ ID NO: 5743 - DNA, 20 bp, Homo Sapiens
tgttttgtgcagcacagttt

SEQ ID NO: 5744 - DNA, 20 bp, Homo Sapiens
gttttgtgcagcacagtttt

SEQ ID NO: 5745 - DNA, 20 bp, Homo Sapiens
ttttgtgcagcacagttttt

SEQ ID NO: 5746 - DNA, 20 bp, Homo Sapiens
tttgtgcagcacagttttta

SEQ ID NO: 5747 - DNA, 20 bp, Homo Sapiens
ttgtgcagcacagtttttaa

SEQ ID NO: 5748 - DNA, 20 bp, Homo Sapiens
tgtgcagcacagtttttaat

SEQ ID NO: 5749 - DNA, 20 bp, Homo Sapiens
gtgcagcacagtttttaata

SEQ ID NO: 5750 - DNA, 20 bp, Homo Sapiens
tgcagcacagtttttaataa

SEQ ID NO: 5751 - DNA, 20 bp, Homo Sapiens
gcagcacagtttttaataaa

SEQ ID NO: 5752 - DNA, 20 bp, Homo Sapiens
cagcacagtttttaataaat

SEQ ID NO: 5753 - DNA, 20 bp, Homo Sapiens
agcacagtttttaataaatg

SEQ ID NO: 5754 - DNA, 20 bp, Homo Sapiens
gcacagtttttaataaatgc

SEQ ID NO: 5755 - DNA, 20 bp, Homo Sapiens
cacagtttttaataaatgct

SEQ ID NO: 5756 - DNA, 20 bp, Homo Sapiens
acagtttttaataaatgctt

SEQ ID NO: 5757 - DNA, 20 bp, Homo Sapiens
cagtttttaataaatgcttg

SEQ ID NO: 5758 - DNA, 20 bp, Homo Sapiens
agtttttaataaatgcttgt

SEQ ID NO: 5759 - DNA, 20 bp, Homo Sapiens
gtttttaataaatgcttgtt

SEQ ID NO: 5760 - DNA, 20 bp, Homo Sapiens
tttttaataaatgcttgtta

SEQ ID NO: 5761 - DNA, 20 bp, Homo Sapiens
ttttaataaatgcttgttac

SEQ ID NO: 5762 - DNA, 20 bp, Homo Sapiens
tttaataaatgcttgttaca

SEQ ID NO: 5763 - DNA, 20 bp, Homo Sapiens
ttaataaatgcttgttacat

SEQ ID NO: 5764 - DNA, 20 bp, Homo Sapiens
taataaatgcttgttacatt

SEQ ID NO: 5765 - DNA, 20 bp, Homo Sapiens
aataaatgcttgttacattc

SEQ ID NO: 5766 - DNA, 20 bp, Homo Sapiens
ataaatgcttgttacattca

SEQ ID NO: 5767 - DNA, 20 bp, Homo Sapiens
taaatgcttgttacattcat

SEQ ID NO: 5768 - DNA, 20 bp, Homo Sapiens
aaatgcttgttacattcatt

SEQ ID NO: 5769 - DNA, 20 bp, Homo Sapiens
aatgcttgttacattcattt

SEQ ID NO: 5770 - DNA, 20 bp, Homo Sapiens
atgcttgttacattcattta

SEQ ID NO: 5771 - DNA, 20 bp, Homo Sapiens
tgcttgttacattcatttaa

SEQ ID NO: 5772 - DNA, 20 bp, Homo Sapiens
gcttgttacattcatttaaa

SEQ ID NO: 5773 - DNA, 20 bp, Homo Sapiens
cttgttacattcatttaaaa

SEQ ID NO: 5774 - DNA, 20 bp, Homo Sapiens
ttgttacattcatttaaaaa

SEQ ID NO: 5775 - DNA, 20 bp, Homo Sapiens
tgttacattcatttaaaaaa

SEQ ID NO: 5776 - DNA, 20 bp, Homo Sapiens
gttacattcatttaaaaaaa

SEQ ID NO: 5777 - DNA, 20 bp, Homo Sapiens
ttacattcatttaaaaaaaa

SEQ ID NO: 5778 - DNA, 20 bp, Homo Sapiens
tacattcatttaaaaaaaaa

SEQ ID NO: 5779 - DNA, 20 bp, Homo Sapiens
acattcatttaaaaaaaaaa

SEQ ID NO: 5780 - DNA, 20 bp, Homo Sapiens
cattcatttaaaaaaaaaaa

SEQ ID NO: 5781 - DNA, 20 bp, Homo Sapiens
attcatttaaaaaaaaaaaa

SEQ ID NO: 5782 - DNA, 20 bp, Homo Sapiens
ttcatttaaaaaaaaaaaaa

SEQ ID NO: 5783 - DNA, 20 bp, Homo Sapiens
tcatttaaaaaaaaaaaaaa

SEQ ID NO: 5784 - DNA, 20 bp, Homo Sapiens
agttagagccgatctcccgc

SEQ ID NO: 5785 - DNA, 20 bp, Homo Sapiens
gttagagccgatctcccgcg

SEQ ID NO: 5786 - DNA, 20 bp, Homo Sapiens
ttagagccgatctcccgcgc

SEQ ID NO: 5787 - DNA, 20 bp, Homo Sapiens
tagagccgatctcccgcgcc

SEQ ID NO: 5788 - DNA, 20 bp, Homo Sapiens
agagccgatctcccgcgccc

SEQ ID NO: 5789 - DNA, 20 bp, Homo Sapiens
gagccgatctcccgcgcccc

SEQ ID NO: 5790 - DNA, 20 bp, Homo Sapiens
agccgatctcccgcgccccg

SEQ ID NO: 5791 - DNA, 20 bp, Homo Sapiens
gccgatctcccgcgccccga

SEQ ID NO: 5792 - DNA, 20 bp, Homo Sapiens
ccgatctcccgcgccccgag

SEQ ID NO: 5793 - DNA, 20 bp, Homo Sapiens
cgatctcccgcgccccgagg

SEQ ID NO: 5794 - DNA, 20 bp, Homo Sapiens
gatctcccgcgccccgaggt

SEQ ID NO: 5795 - DNA, 20 bp, Homo Sapiens
atctcccgcgccccgaggtt

SEQ ID NO: 5796 - DNA, 20 bp, Homo Sapiens
tctcccgcgccccgaggttg

SEQ ID NO: 5797 - DNA, 20 bp, Homo Sapiens
ctcccgcgccccgaggttgc

SEQ ID NO: 5798 - DNA, 20 bp, Homo Sapiens
tcccgcgccccgaggttgct

SEQ ID NO: 5799 - DNA, 20 bp, Homo Sapiens
cccgcgccccgaggttgctc

SEQ ID NO: 5800 - DNA, 20 bp, Homo Sapiens
ccgcgccccgaggttgctcc

SEQ ID NO: 5801 - DNA, 20 bp, Homo Sapiens
cgcgccccgaggttgctcct

SEQ ID NO: 5802 - DNA, 20 bp, Homo Sapiens
gcgccccgaggttgctcctc

SEQ ID NO: 5803 - DNA, 20 bp, Homo Sapiens
cgccccgaggttgctcctct

SEQ ID NO: 5804 - DNA, 20 bp, Homo Sapiens
gccccgaggttgctcctctc

SEQ ID NO: 5805 - DNA, 20 bp, Homo Sapiens
ccccgaggttgctcctctcc

SEQ ID NO: 5806 - DNA, 20 bp, Homo Sapiens
cccgaggttgctcctctccg

SEQ ID NO: 5807 - DNA, 20 bp, Homo Sapiens
ccgaggttgctcctctccga

SEQ ID NO: 5808 - DNA, 20 bp, Homo Sapiens
cgaggttgctcctctccgag

SEQ ID NO: 5809 - DNA, 20 bp, Homo Sapiens
gaggttgctcctctccgagg

SEQ ID NO: 5810 - DNA, 20 bp, Homo Sapiens
aggttgctcctctccgaggt

SEQ ID NO: 5811 - DNA, 20 bp, Homo Sapiens
ggttgctcctctccgaggtc

SEQ ID NO: 5812 - DNA, 20 bp, Homo Sapiens
gttgctcctctccgaggtct

SEQ ID NO: 5813 - DNA, 20 bp, Homo Sapiens
ttgctcctctccgaggtctc

SEQ ID NO: 5814 - DNA, 20 bp, Homo Sapiens
tgctcctctccgaggtctcc

SEQ ID NO: 5815 - DNA, 20 bp, Homo Sapiens
gctcctctccgaggtctccc

SEQ ID NO: 5816 - DNA, 20 bp, Homo Sapiens
ctcctctccgaggtctcccg

SEQ ID NO: 5817 - DNA, 20 bp, Homo Sapiens
tcctctccgaggtctcccgc

SEQ ID NO: 5818 - DNA, 20 bp, Homo Sapiens
cctctccgaggtctcccgcg

SEQ ID NO: 5819 - DNA, 20 bp, Homo Sapiens
ctctccgaggtctcccgcgg

SEQ ID NO: 5820 - DNA, 20 bp, Homo Sapiens
tctccgaggtctcccgcggc

SEQ ID NO: 5821 - DNA, 20 bp, Homo Sapiens
ctccgaggtctcccgcggcc

SEQ ID NO: 5822 - DNA, 20 bp, Homo Sapiens
tccgaggtctcccgcggccc

SEQ ID NO: 5823 - DNA, 20 bp, Homo Sapiens
ccgaggtctcccgcggccca

SEQ ID NO: 5824 - DNA, 20 bp, Homo Sapiens
cgaggtctcccgcggcccaa

SEQ ID NO: 5825 - DNA, 20 bp, Homo Sapiens
gaggtctcccgcggcccaag

SEQ ID NO: 5826 - DNA, 20 bp, Homo Sapiens
aggtctcccgcggcccaagt

SEQ ID NO: 5827 - DNA, 20 bp, Homo Sapiens
ggtctcccgcggcccaagtt

SEQ ID NO: 5828 - DNA, 20 bp, Homo Sapiens
gtctcccgcggcccaagttc

SEQ ID NO: 5829 - DNA, 20 bp, Homo Sapiens
tctcccgcggcccaagttct

SEQ ID NO: 5830 - DNA, 20 bp, Homo Sapiens
ctcccgcggcccaagttctc

SEQ ID NO: 5831 - DNA, 20 bp, Homo Sapiens
tcccgcggcccaagttctcc

SEQ ID NO: 5832 - DNA, 20 bp, Homo Sapiens
cccgcggcccaagttctccg

SEQ ID NO: 5833 - DNA, 20 bp, Homo Sapiens
ccgcggcccaagttctccgc

SEQ ID NO: 5834 - DNA, 20 bp, Homo Sapiens
cgcggcccaagttctccgcg

SEQ ID NO: 5835 - DNA, 20 bp, Homo Sapiens
gcggcccaagttctccgcgc

SEQ ID NO: 5836 - DNA, 20 bp, Homo Sapiens
cggcccaagttctccgcgcc

SEQ ID NO: 5837 - DNA, 20 bp, Homo Sapiens
ggcccaagttctccgcgccc

SEQ ID NO: 5838 - DNA, 20 bp, Homo Sapiens
gcccaagttctccgcgcccc

SEQ ID NO: 5839 - DNA, 20 bp, Homo Sapiens
cccaagttctccgcgccccg

SEQ ID NO: 5840 - DNA, 20 bp, Homo Sapiens
ccaagttctccgcgccccga

SEQ ID NO: 5841 - DNA, 20 bp, Homo Sapiens
caagttctccgcgccccgag

SEQ ID NO: 5842 - DNA, 20 bp, Homo Sapiens
aagttctccgcgccccgagg

SEQ ID NO: 5843 - DNA, 20 bp, Homo Sapiens
agttctccgcgccccgaggt

SEQ ID NO: 5844 - DNA, 20 bp, Homo Sapiens
gttctccgcgccccgaggtc

SEQ ID NO: 5845 - DNA, 20 bp, Homo Sapiens
ttctccgcgccccgaggtct

SEQ ID NO: 5846 - DNA, 20 bp, Homo Sapiens
tctccgcgccccgaggtctc

SEQ ID NO: 5847 - DNA, 20 bp, Homo Sapiens
ctccgcgccccgaggtctcc

SEQ ID NO: 5848 - DNA, 20 bp, Homo Sapiens
tccgcgccccgaggtctccg

SEQ ID NO: 5849 - DNA, 20 bp, Homo Sapiens
ccgcgccccgaggtctccgc

SEQ ID NO: 5850 - DNA, 20 bp, Homo Sapiens
cgcgccccgaggtctccgcg

SEQ ID NO: 5851 - DNA, 20 bp, Homo Sapiens
gcgccccgaggtctccgcgc

SEQ ID NO: 5852 - DNA, 20 bp, Homo Sapiens
cgccccgaggtctccgcgcc

SEQ ID NO: 5853 - DNA, 20 bp, Homo Sapiens
gccccgaggtctccgcgccc

SEQ ID NO: 5854 - DNA, 20 bp, Homo Sapiens
ccccgaggtctccgcgcccc

SEQ ID NO: 5855 - DNA, 20 bp, Homo Sapiens
cccgaggtctccgcgccccg

SEQ ID NO: 5856 - DNA, 20 bp, Homo Sapiens
ccgaggtctccgcgccccga

SEQ ID NO: 5857 - DNA, 20 bp, Homo Sapiens
cgaggtctccgcgccccgag

SEQ ID NO: 5858 - DNA, 20 bp, Homo Sapiens
gaggtctccgcgccccgagg

SEQ ID NO: 5859 - DNA, 20 bp, Homo Sapiens
aggtctccgcgccccgaggt

SEQ ID NO: 5860 - DNA, 20 bp, Homo Sapiens
ggtctccgcgccccgaggtc

SEQ ID NO: 5861 - DNA, 20 bp, Homo Sapiens
gtctccgcgccccgaggtct

SEQ ID NO: 5862 - DNA, 20 bp, Homo Sapiens
tctccgcgccccgaggtctc

SEQ ID NO: 5863 - DNA, 20 bp, Homo Sapiens
ctccgcgccccgaggtctcc

SEQ ID NO: 5864 - DNA, 20 bp, Homo Sapiens
tccgcgccccgaggtctccg

SEQ ID NO: 5865 - DNA, 20 bp, Homo Sapiens
ccgcgccccgaggtctccgc

SEQ ID NO: 5866 - DNA, 20 bp, Homo Sapiens
cgcgccccgaggtctccgcg

SEQ ID NO: 5867 - DNA, 20 bp, Homo Sapiens
gcgccccgaggtctccgcgg

SEQ ID NO: 5868 - DNA, 20 bp, Homo Sapiens
cgccccgaggtctccgcggc

SEQ ID NO: 5869 - DNA, 20 bp, Homo Sapiens
gccccgaggtctccgcggcc

SEQ ID NO: 5870 - DNA, 20 bp, Homo Sapiens
ccccgaggtctccgcggccc

SEQ ID NO: 5871 - DNA, 20 bp, Homo Sapiens
cccgaggtctccgcggcccg

SEQ ID NO: 5872 - DNA, 20 bp, Homo Sapiens
ccgaggtctccgcggcccga

SEQ ID NO: 5873 - DNA, 20 bp, Homo Sapiens
cgaggtctccgcggcccgag

SEQ ID NO: 5874 - DNA, 20 bp, Homo Sapiens
gaggtctccgcggcccgagg

SEQ ID NO: 5875 - DNA, 20 bp, Homo Sapiens
aggtctccgcggcccgaggt

SEQ ID NO: 5876 - DNA, 20 bp, Homo Sapiens
ggtctccgcggcccgaggtc

SEQ ID NO: 5877 - DNA, 20 bp, Homo Sapiens
gtctccgcggcccgaggtct

SEQ ID NO: 5878 - DNA, 20 bp, Homo Sapiens
tctccgcggcccgaggtctc

SEQ ID NO: 5879 - DNA, 20 bp, Homo Sapiens
ctccgcggcccgaggtctcc

SEQ ID NO: 5880 - DNA, 20 bp, Homo Sapiens
tccgcggcccgaggtctccg

SEQ ID NO: 5881 - DNA, 20 bp, Homo Sapiens
ccgcggcccgaggtctccgc

SEQ ID NO: 5882 - DNA, 20 bp, Homo Sapiens
cgcggcccgaggtctccgcc

SEQ ID NO: 5883 - DNA, 20 bp, Homo Sapiens
gcggcccgaggtctccgccc

SEQ ID NO: 5884 - DNA, 20 bp, Homo Sapiens
cggcccgaggtctccgcccg

SEQ ID NO: 5885 - DNA, 20 bp, Homo Sapiens
ggcccgaggtctccgcccgc

SEQ ID NO: 5886 - DNA, 20 bp, Homo Sapiens
gcccgaggtctccgcccgca

SEQ ID NO: 5887 - DNA, 20 bp, Homo Sapiens
cccgaggtctccgcccgcac

SEQ ID NO: 5888 - DNA, 20 bp, Homo Sapiens
ccgaggtctccgcccgcacc

SEQ ID NO: 5889 - DNA, 20 bp, Homo Sapiens
cgaggtctccgcccgcacca

SEQ ID NO: 5890 - DNA, 20 bp, Homo Sapiens
gaggtctccgcccgcaccat

SEQ ID NO: 5891 - DNA, 20 bp, Homo Sapiens
aggtctccgcccgcaccatg

SEQ ID NO: 5892 - DNA, 20 bp, Homo Sapiens
ggtctccgcccgcaccatgc

SEQ ID NO: 5893 - DNA, 20 bp, Homo Sapiens
gtctccgcccgcaccatgcg

SEQ ID NO: 5894 - DNA, 20 bp, Homo Sapiens
tctccgcccgcaccatgcgg

SEQ ID NO: 5895 - DNA, 20 bp, Homo Sapiens
ctccgcccgcaccatgcggc

SEQ ID NO: 5896 - DNA, 20 bp, Homo Sapiens
tccgcccgcaccatgcggct

SEQ ID NO: 5897 - DNA, 20 bp, Homo Sapiens
ccgcccgcaccatgcggctg

SEQ ID NO: 5898 - DNA, 20 bp, Homo Sapiens
cgcccgcaccatgcggctgg

SEQ ID NO: 5899 - DNA, 20 bp, Homo Sapiens
gcccgcaccatgcggctggg

SEQ ID NO: 5900 - DNA, 20 bp, Homo Sapiens
cccgcaccatgcggctgggc

SEQ ID NO: 5901 - DNA, 20 bp, Homo Sapiens
ccgcaccatgcggctgggca

SEQ ID NO: 5902 - DNA, 20 bp, Homo Sapiens
cgcaccatgcggctgggcag

SEQ ID NO: 5903 - DNA, 20 bp, Homo Sapiens
gcaccatgcggctgggcagt

SEQ ID NO: 5904 - DNA, 20 bp, Homo Sapiens
caccatgcggctgggcagtc

SEQ ID NO: 5905 - DNA, 20 bp, Homo Sapiens
accatgcggctgggcagtcc

SEQ ID NO: 5906 - DNA, 20 bp, Homo Sapiens
ccatgcggctgggcagtcct

SEQ ID NO: 5907 - DNA, 20 bp, Homo Sapiens
catgcggctgggcagtcctg

SEQ ID NO: 5908 - DNA, 20 bp, Homo Sapiens
atgcggctgggcagtcctgg

SEQ ID NO: 5909 - DNA, 20 bp, Homo Sapiens
tgcggctgggcagtcctgga

SEQ ID NO: 5910 - DNA, 20 bp, Homo Sapiens
gcggctgggcagtcctggac

SEQ ID NO: 5911 - DNA, 20 bp, Homo Sapiens
cggctgggcagtcctggact

SEQ ID NO: 5912 - DNA, 20 bp, Homo Sapiens
ggctgggcagtcctggactg

SEQ ID NO: 5913 - DNA, 20 bp, Homo Sapiens
gctgggcagtcctggactgc

SEQ ID NO: 5914 - DNA, 20 bp, Homo Sapiens
ctgggcagtcctggactgct

SEQ ID NO: 5915 - DNA, 20 bp, Homo Sapiens
tgggcagtcctggactgctc

SEQ ID NO: 5916 - DNA, 20 bp, Homo Sapiens
gggcagtcctggactgctct

SEQ ID NO: 5917 - DNA, 20 bp, Homo Sapiens
ggcagtcctggactgctctt

SEQ ID NO: 5918 - DNA, 20 bp, Homo Sapiens
gcagtcctggactgctcttc

SEQ ID NO: 5919 - DNA, 20 bp, Homo Sapiens
cagtcctggactgctcttcc

SEQ ID NO: 5920 - DNA, 20 bp, Homo Sapiens
agtcctggactgctcttcct

SEQ ID NO: 5921 - DNA, 20 bp, Homo Sapiens
gtcctggactgctcttcctg

SEQ ID NO: 5922 - DNA, 20 bp, Homo Sapiens
tcctggactgctcttcctgc

SEQ ID NO: 5923 - DNA, 20 bp, Homo Sapiens
cctggactgctcttcctgct

SEQ ID NO: 5924 - DNA, 20 bp, Homo Sapiens
ctggactgctcttcctgctc

SEQ ID NO: 5925 - DNA, 20 bp, Homo Sapiens
tggactgctcttcctgctct

SEQ ID NO: 5926 - DNA, 20 bp, Homo Sapiens
ggactgctcttcctgctctt

SEQ ID NO: 5927 - DNA, 20 bp, Homo Sapiens
gactgctcttcctgctcttc

SEQ ID NO: 5928 - DNA, 20 bp, Homo Sapiens
actgctcttcctgctcttca

SEQ ID NO: 5929 - DNA, 20 bp, Homo Sapiens
ctgctcttcctgctcttcag

SEQ ID NO: 5930 - DNA, 20 bp, Homo Sapiens
tgctcttcctgctcttcagc

SEQ ID NO: 5931 - DNA, 20 bp, Homo Sapiens
gctcttcctgctcttcagca

SEQ ID NO: 5932 - DNA, 20 bp, Homo Sapiens
ctcttcctgctcttcagcag

SEQ ID NO: 5933 - DNA, 20 bp, Homo Sapiens
tcttcctgctcttcagcagc

SEQ ID NO: 5934 - DNA, 20 bp, Homo Sapiens
cttcctgctcttcagcagcc

SEQ ID NO: 5935 - DNA, 20 bp, Homo Sapiens
ttcctgctcttcagcagcct

SEQ ID NO: 5936 - DNA, 20 bp, Homo Sapiens
tcctgctcttcagcagcctt

SEQ ID NO: 5937 - DNA, 20 bp, Homo Sapiens
cctgctcttcagcagccttc

SEQ ID NO: 5938 - DNA, 20 bp, Homo Sapiens
ctgctcttcagcagccttcg

SEQ ID NO: 5939 - DNA, 20 bp, Homo Sapiens
tgctcttcagcagccttcga

SEQ ID NO: 5940 - DNA, 20 bp, Homo Sapiens
gctcttcagcagccttcgag

SEQ ID NO: 5941 - DNA, 20 bp, Homo Sapiens
ctcttcagcagccttcgagc

SEQ ID NO: 5942 - DNA, 20 bp, Homo Sapiens
tcttcagcagccttcgagct

SEQ ID NO: 5943 - DNA, 20 bp, Homo Sapiens
cttcagcagccttcgagctg

SEQ ID NO: 5944 - DNA, 20 bp, Homo Sapiens
ttcagcagccttcgagctga

SEQ ID NO: 5945 - DNA, 20 bp, Homo Sapiens
tcagcagccttcgagctgat

SEQ ID NO: 5946 - DNA, 20 bp, Homo Sapiens
cagcagccttcgagctgata

SEQ ID NO: 5947 - DNA, 20 bp, Homo Sapiens
agcagccttcgagctgatac

SEQ ID NO: 5948 - DNA, 20 bp, Homo Sapiens
gcagccttcgagctgatact

SEQ ID NO: 5949 - DNA, 20 bp, Homo Sapiens
cagccttcgagctgatactc

SEQ ID NO: 5950 - DNA, 20 bp, Homo Sapiens
agccttcgagctgatactca

SEQ ID NO: 5951 - DNA, 20 bp, Homo Sapiens
gccttcgagctgatactcag

SEQ ID NO: 5952 - DNA, 20 bp, Homo Sapiens
ccttcgagctgatactcagg

SEQ ID NO: 5953 - DNA, 20 bp, Homo Sapiens
cttcgagctgatactcagga

SEQ ID NO: 5954 - DNA, 20 bp, Homo Sapiens
ttcgagctgatactcaggag

SEQ ID NO: 5955 - DNA, 20 bp, Homo Sapiens
tcgagctgatactcaggaga

SEQ ID NO: 5956 - DNA, 20 bp, Homo Sapiens
cgagctgatactcaggagaa

SEQ ID NO: 5957 - DNA, 20 bp, Homo Sapiens
gagctgatactcaggagaag

SEQ ID NO: 5958 - DNA, 20 bp, Homo Sapiens
agctgatactcaggagaagg

SEQ ID NO: 5959 - DNA, 20 bp, Homo Sapiens
gctgatactcaggagaagga

SEQ ID NO: 5960 - DNA, 20 bp, Homo Sapiens
ctgatactcaggagaaggaa

SEQ ID NO: 5961 - DNA, 20 bp, Homo Sapiens
tgatactcaggagaaggaag

SEQ ID NO: 5962 - DNA, 20 bp, Homo Sapiens
gatactcaggagaaggaagt

SEQ ID NO: 5963 - DNA, 20 bp, Homo Sapiens
atactcaggagaaggaagtc

SEQ ID NO: 5964 - DNA, 20 bp, Homo Sapiens
tactcaggagaaggaagtca

SEQ ID NO: 5965 - DNA, 20 bp, Homo Sapiens
actcaggagaaggaagtcag

SEQ ID NO: 5966 - DNA, 20 bp, Homo Sapiens
ctcaggagaaggaagtcaga

SEQ ID NO: 5967 - DNA, 20 bp, Homo Sapiens
tcaggagaaggaagtcagag

SEQ ID NO: 5968 - DNA, 20 bp, Homo Sapiens
caggagaaggaagtcagagc

SEQ ID NO: 5969 - DNA, 20 bp, Homo Sapiens
aggagaaggaagtcagagcg

SEQ ID NO: 5970 - DNA, 20 bp, Homo Sapiens
ggagaaggaagtcagagcga

SEQ ID NO: 5971 - DNA, 20 bp, Homo Sapiens
gagaaggaagtcagagcgat

SEQ ID NO: 5972 - DNA, 20 bp, Homo Sapiens
agaaggaagtcagagcgatg

SEQ ID NO: 5973 - DNA, 20 bp, Homo Sapiens
gaaggaagtcagagcgatgg

SEQ ID NO: 5974 - DNA, 20 bp, Homo Sapiens
aaggaagtcagagcgatggt

SEQ ID NO: 5975 - DNA, 20 bp, Homo Sapiens
aggaagtcagagcgatggta

SEQ ID NO: 5976 - DNA, 20 bp, Homo Sapiens
ggaagtcagagcgatggtag

SEQ ID NO: 5977 - DNA, 20 bp, Homo Sapiens
gaagtcagagcgatggtagg

SEQ ID NO: 5978 - DNA, 20 bp, Homo Sapiens
aagtcagagcgatggtaggc

SEQ ID NO: 5979 - DNA, 20 bp, Homo Sapiens
agtcagagcgatggtaggca

SEQ ID NO: 5980 - DNA, 20 bp, Homo Sapiens
gtcagagcgatggtaggcag

SEQ ID NO: 5981 - DNA, 20 bp, Homo Sapiens
tcagagcgatggtaggcagc

SEQ ID NO: 5982 - DNA, 20 bp, Homo Sapiens
cagagcgatggtaggcagcg

SEQ ID NO: 5983 - DNA, 20 bp, Homo Sapiens
agagcgatggtaggcagcga

SEQ ID NO: 5984 - DNA, 20 bp, Homo Sapiens
gagcgatggtaggcagcgac

SEQ ID NO: 5985 - DNA, 20 bp, Homo Sapiens
agcgatggtaggcagcgacg

SEQ ID NO: 5986 - DNA, 20 bp, Homo Sapiens
gcgatggtaggcagcgacgt

SEQ ID NO: 5987 - DNA, 20 bp, Homo Sapiens
cgatggtaggcagcgacgtg

SEQ ID NO: 5988 - DNA, 20 bp, Homo Sapiens
gatggtaggcagcgacgtgg

SEQ ID NO: 5989 - DNA, 20 bp, Homo Sapiens
atggtaggcagcgacgtgga

SEQ ID NO: 5990 - DNA, 20 bp, Homo Sapiens
tggtaggcagcgacgtggag

SEQ ID NO: 5991 - DNA, 20 bp, Homo Sapiens
ggtaggcagcgacgtggagc

SEQ ID NO: 5992 - DNA, 20 bp, Homo Sapiens
gtaggcagcgacgtggagct

SEQ ID NO: 5993 - DNA, 20 bp, Homo Sapiens
taggcagcgacgtggagctc

SEQ ID NO: 5994 - DNA, 20 bp, Homo Sapiens
aggcagcgacgtggagctca

SEQ ID NO: 5995 - DNA, 20 bp, Homo Sapiens
ggcagcgacgtggagctcag

SEQ ID NO: 5996 - DNA, 20 bp, Homo Sapiens
gcagcgacgtggagctcagc

SEQ ID NO: 5997 - DNA, 20 bp, Homo Sapiens
cagcgacgtggagctcagct

SEQ ID NO: 5998 - DNA, 20 bp, Homo Sapiens
agcgacgtggagctcagctg

SEQ ID NO: 5999 - DNA, 20 bp, Homo Sapiens
gcgacgtggagctcagctgc

SEQ ID NO: 6000 - DNA, 20 bp, Homo Sapiens
cgacgtggagctcagctgcg

SEQ ID NO: 6001 - DNA, 20 bp, Homo Sapiens
gacgtggagctcagctgcgc

SEQ ID NO: 6002 - DNA, 20 bp, Homo Sapiens
acgtggagctcagctgcgct

SEQ ID NO: 6003 - DNA, 20 bp, Homo Sapiens
cgtggagctcagctgcgctt

SEQ ID NO: 6004 - DNA, 20 bp, Homo Sapiens
gtggagctcagctgcgcttg

SEQ ID NO: 6005 - DNA, 20 bp, Homo Sapiens
tggagctcagctgcgcttgc

SEQ ID NO: 6006 - DNA, 20 bp, Homo Sapiens
ggagctcagctgcgcttgcc

SEQ ID NO: 6007 - DNA, 20 bp, Homo Sapiens
gagctcagctgcgcttgccc

SEQ ID NO: 6008 - DNA, 20 bp, Homo Sapiens
agctcagctgcgcttgccct

SEQ ID NO: 6009 - DNA, 20 bp, Homo Sapiens
gctcagctgcgcttgccctg

SEQ ID NO: 6010 - DNA, 20 bp, Homo Sapiens
ctcagctgcgcttgccctga

SEQ ID NO: 6011 - DNA, 20 bp, Homo Sapiens
tcagctgcgcttgccctgaa

SEQ ID NO: 6012 - DNA, 20 bp, Homo Sapiens
cagctgcgcttgccctgaag

SEQ ID NO: 6013 - DNA, 20 bp, Homo Sapiens
agctgcgcttgccctgaagg

SEQ ID NO: 6014 - DNA, 20 bp, Homo Sapiens
gctgcgcttgccctgaagga

SEQ ID NO: 6015 - DNA, 20 bp, Homo Sapiens
ctgcgcttgccctgaaggaa

SEQ ID NO: 6016 - DNA, 20 bp, Homo Sapiens
tgcgcttgccctgaaggaag

SEQ ID NO: 6017 - DNA, 20 bp, Homo Sapiens
gcgcttgccctgaaggaagc

SEQ ID NO: 6018 - DNA, 20 bp, Homo Sapiens
cgcttgccctgaaggaagcc

SEQ ID NO: 6019 - DNA, 20 bp, Homo Sapiens
gcttgccctgaaggaagccg

SEQ ID NO: 6020 - DNA, 20 bp, Homo Sapiens
cttgccctgaaggaagccgt

SEQ ID NO: 6021 - DNA, 20 bp, Homo Sapiens
ttgccctgaaggaagccgtt

SEQ ID NO: 6022 - DNA, 20 bp, Homo Sapiens
tgccctgaaggaagccgttt

SEQ ID NO: 6023 - DNA, 20 bp, Homo Sapiens
gccctgaaggaagccgtttt

SEQ ID NO: 6024 - DNA, 20 bp, Homo Sapiens
ccctgaaggaagccgttttg

SEQ ID NO: 6025 - DNA, 20 bp, Homo Sapiens
cctgaaggaagccgttttga

SEQ ID NO: 6026 - DNA, 20 bp, Homo Sapiens
ctgaaggaagccgttttgat

SEQ ID NO: 6027 - DNA, 20 bp, Homo Sapiens
tgaaggaagccgttttgatt

SEQ ID NO: 6028 - DNA, 20 bp, Homo Sapiens
gaaggaagccgttttgattt

SEQ ID NO: 6029 - DNA, 20 bp, Homo Sapiens
aaggaagccgttttgattta

SEQ ID NO: 6030 - DNA, 20 bp, Homo Sapiens
aggaagccgttttgatttaa

SEQ ID NO: 6031 - DNA, 20 bp, Homo Sapiens
ggaagccgttttgatttaaa

SEQ ID NO: 6032 - DNA, 20 bp, Homo Sapiens
gaagccgttttgatttaaat

SEQ ID NO: 6033 - DNA, 20 bp, Homo Sapiens
aagccgttttgatttaaatg

SEQ ID NO: 6034 - DNA, 20 bp, Homo Sapiens
agccgttttgatttaaatga

SEQ ID NO: 6035 - DNA, 20 bp, Homo Sapiens
gccgttttgatttaaatgat

SEQ ID NO: 6036 - DNA, 20 bp, Homo Sapiens
ccgttttgatttaaatgatg

SEQ ID NO: 6037 - DNA, 20 bp, Homo Sapiens
cgttttgatttaaatgatgt

SEQ ID NO: 6038 - DNA, 20 bp, Homo Sapiens
gttttgatttaaatgatgtt

SEQ ID NO: 6039 - DNA, 20 bp, Homo Sapiens
ttttgatttaaatgatgttt

SEQ ID NO: 6040 - DNA, 20 bp, Homo Sapiens
tttgatttaaatgatgttta

SEQ ID NO: 6041 - DNA, 20 bp, Homo Sapiens
ttgatttaaatgatgtttac

SEQ ID NO: 6042 - DNA, 20 bp, Homo Sapiens
tgatttaaatgatgtttacg

SEQ ID NO: 6043 - DNA, 20 bp, Homo Sapiens
gatttaaatgatgtttacgt

SEQ ID NO: 6044 - DNA, 20 bp, Homo Sapiens
atttaaatgatgtttacgta

SEQ ID NO: 6045 - DNA, 20 bp, Homo Sapiens
tttaaatgatgtttacgtat

SEQ ID NO: 6046 - DNA, 20 bp, Homo Sapiens
ttaaatgatgtttacgtata

SEQ ID NO: 6047 - DNA, 20 bp, Homo Sapiens
taaatgatgtttacgtatat

SEQ ID NO: 6048 - DNA, 20 bp, Homo Sapiens
aaatgatgtttacgtatatt

SEQ ID NO: 6049 - DNA, 20 bp, Homo Sapiens
aatgatgtttacgtatattg

SEQ ID NO: 6050 - DNA, 20 bp, Homo Sapiens
atgatgtttacgtatattgg

SEQ ID NO: 6051 - DNA, 20 bp, Homo Sapiens
tgatgtttacgtatattggc

SEQ ID NO: 6052 - DNA, 20 bp, Homo Sapiens
gatgtttacgtatattggca

SEQ ID NO: 6053 - DNA, 20 bp, Homo Sapiens
atgtttacgtatattggcaa

SEQ ID NO: 6054 - DNA, 20 bp, Homo Sapiens
tgtttacgtatattggcaaa

SEQ ID NO: 6055 - DNA, 20 bp, Homo Sapiens
gtttacgtatattggcaaac

SEQ ID NO: 6056 - DNA, 20 bp, Homo Sapiens
tttacgtatattggcaaacc

SEQ ID NO: 6057 - DNA, 20 bp, Homo Sapiens
ttacgtatattggcaaacca

SEQ ID NO: 6058 - DNA, 20 bp, Homo Sapiens
tacgtatattggcaaaccag

SEQ ID NO: 6059 - DNA, 20 bp, Homo Sapiens
acgtatattggcaaaccagt

SEQ ID NO: 6060 - DNA, 20 bp, Homo Sapiens
cgtatattggcaaaccagtg

SEQ ID NO: 6061 - DNA, 20 bp, Homo Sapiens
gtatattggcaaaccagtga

SEQ ID NO: 6062 - DNA, 20 bp, Homo Sapiens
tatattggcaaaccagtgag

SEQ ID NO: 6063 - DNA, 20 bp, Homo Sapiens
atattggcaaaccagtgagt

SEQ ID NO: 6064 - DNA, 20 bp, Homo Sapiens
tattggcaaaccagtgagtc

SEQ ID NO: 6065 - DNA, 20 bp, Homo Sapiens
attggcaaaccagtgagtcg

SEQ ID NO: 6066 - DNA, 20 bp, Homo Sapiens
ttggcaaaccagtgagtcga

SEQ ID NO: 6067 - DNA, 20 bp, Homo Sapiens
tggcaaaccagtgagtcgaa

SEQ ID NO: 6068 - DNA, 20 bp, Homo Sapiens
ggcaaaccagtgagtcgaaa

SEQ ID NO: 6069 - DNA, 20 bp, Homo Sapiens
gcaaaccagtgagtcgaaaa

SEQ ID NO: 6070 - DNA, 20 bp, Homo Sapiens
caaaccagtgagtcgaaaac

SEQ ID NO: 6071 - DNA, 20 bp, Homo Sapiens
aaaccagtgagtcgaaaacc

SEQ ID NO: 6072 - DNA, 20 bp, Homo Sapiens
aaccagtgagtcgaaaaccg

SEQ ID NO: 6073 - DNA, 20 bp, Homo Sapiens
accagtgagtcgaaaaccgt

SEQ ID NO: 6074 - DNA, 20 bp, Homo Sapiens
ccagtgagtcgaaaaccgtg

SEQ ID NO: 6075 - DNA, 20 bp, Homo Sapiens
cagtgagtcgaaaaccgtgg

SEQ ID NO: 6076 - DNA, 20 bp, Homo Sapiens
agtgagtcgaaaaccgtggt

SEQ ID NO: 6077 - DNA, 20 bp, Homo Sapiens
gtgagtcgaaaaccgtggtg

SEQ ID NO: 6078 - DNA, 20 bp, Homo Sapiens
tgagtcgaaaaccgtggtga

SEQ ID NO: 6079 - DNA, 20 bp, Homo Sapiens
gagtcgaaaaccgtggtgac

SEQ ID NO: 6080 - DNA, 20 bp, Homo Sapiens
agtcgaaaaccgtggtgacc

SEQ ID NO: 6081 - DNA, 20 bp, Homo Sapiens
gtcgaaaaccgtggtgacct

SEQ ID NO: 6082 - DNA, 20 bp, Homo Sapiens
tcgaaaaccgtggtgaccta

SEQ ID NO: 6083 - DNA, 20 bp, Homo Sapiens
cgaaaaccgtggtgacctac

SEQ ID NO: 6084 - DNA, 20 bp, Homo Sapiens
gaaaaccgtggtgacctacc

SEQ ID NO: 6085 - DNA, 20 bp, Homo Sapiens
aaaaccgtggtgacctacca

SEQ ID NO: 6086 - DNA, 20 bp, Homo Sapiens
aaaccgtggtgacctaccac

SEQ ID NO: 6087 - DNA, 20 bp, Homo Sapiens
aaccgtggtgacctaccaca

SEQ ID NO: 6088 - DNA, 20 bp, Homo Sapiens
accgtggtgacctaccacat

SEQ ID NO: 6089 - DNA, 20 bp, Homo Sapiens
ccgtggtgacctaccacatc

SEQ ID NO: 6090 - DNA, 20 bp, Homo Sapiens
cgtggtgacctaccacatcc

SEQ ID NO: 6091 - DNA, 20 bp, Homo Sapiens
gtggtgacctaccacatccc

SEQ ID NO: 6092 - DNA, 20 bp, Homo Sapiens
tggtgacctaccacatccca

SEQ ID NO: 6093 - DNA, 20 bp, Homo Sapiens
ggtgacctaccacatcccac

SEQ ID NO: 6094 - DNA, 20 bp, Homo Sapiens
gtgacctaccacatcccaca

SEQ ID NO: 6095 - DNA, 20 bp, Homo Sapiens
tgacctaccacatcccacag

SEQ ID NO: 6096 - DNA, 20 bp, Homo Sapiens
gacctaccacatcccacaga

SEQ ID NO: 6097 - DNA, 20 bp, Homo Sapiens
acctaccacatcccacagaa

SEQ ID NO: 6098 - DNA, 20 bp, Homo Sapiens
cctaccacatcccacagaac

SEQ ID NO: 6099 - DNA, 20 bp, Homo Sapiens
ctaccacatcccacagaaca

SEQ ID NO: 6100 - DNA, 20 bp, Homo Sapiens
taccacatcccacagaacag

SEQ ID NO: 6101 - DNA, 20 bp, Homo Sapiens
accacatcccacagaacagc

SEQ ID NO: 6102 - DNA, 20 bp, Homo Sapiens
ccacatcccacagaacagct

SEQ ID NO: 6103 - DNA, 20 bp, Homo Sapiens
cacatcccacagaacagctc

SEQ ID NO: 6104 - DNA, 20 bp, Homo Sapiens
acatcccacagaacagctcc

SEQ ID NO: 6105 - DNA, 20 bp, Homo Sapiens
catcccacagaacagctcct

SEQ ID NO: 6106 - DNA, 20 bp, Homo Sapiens
atcccacagaacagctcctt

SEQ ID NO: 6107 - DNA, 20 bp, Homo Sapiens
tcccacagaacagctccttg

SEQ ID NO: 6108 - DNA, 20 bp, Homo Sapiens
cccacagaacagctccttgg

SEQ ID NO: 6109 - DNA, 20 bp, Homo Sapiens
ccacagaacagctccttgga

SEQ ID NO: 6110 - DNA, 20 bp, Homo Sapiens
cacagaacagctccttggaa

SEQ ID NO: 6111 - DNA, 20 bp, Homo Sapiens
acagaacagctccttggaaa

SEQ ID NO: 6112 - DNA, 20 bp, Homo Sapiens
cagaacagctccttggaaaa

SEQ ID NO: 6113 - DNA, 20 bp, Homo Sapiens
agaacagctccttggaaaac

SEQ ID NO: 6114 - DNA, 20 bp, Homo Sapiens
gaacagctccttggaaaacg

SEQ ID NO: 6115 - DNA, 20 bp, Homo Sapiens
aacagctccttggaaaacgt

SEQ ID NO: 6116 - DNA, 20 bp, Homo Sapiens
acagctccttggaaaacgtg

SEQ ID NO: 6117 - DNA, 20 bp, Homo Sapiens
cagctccttggaaaacgtgg

SEQ ID NO: 6118 - DNA, 20 bp, Homo Sapiens
agctccttggaaaacgtgga

SEQ ID NO: 6119 - DNA, 20 bp, Homo Sapiens
gctccttggaaaacgtggac

SEQ ID NO: 6120 - DNA, 20 bp, Homo Sapiens
ctccttggaaaacgtggaca

SEQ ID NO: 6121 - DNA, 20 bp, Homo Sapiens
tccttggaaaacgtggacag

SEQ ID NO: 6122 - DNA, 20 bp, Homo Sapiens
ccttggaaaacgtggacagc

SEQ ID NO: 6123 - DNA, 20 bp, Homo Sapiens
cttggaaaacgtggacagcc

SEQ ID NO: 6124 - DNA, 20 bp, Homo Sapiens
ttggaaaacgtggacagccg

SEQ ID NO: 6125 - DNA, 20 bp, Homo Sapiens
tggaaaacgtggacagccgc

SEQ ID NO: 6126 - DNA, 20 bp, Homo Sapiens
ggaaaacgtggacagccgct

SEQ ID NO: 6127 - DNA, 20 bp, Homo Sapiens
gaaaacgtggacagccgcta

SEQ ID NO: 6128 - DNA, 20 bp, Homo Sapiens
aaaacgtggacagccgctac

SEQ ID NO: 6129 - DNA, 20 bp, Homo Sapiens
aaacgtggacagccgctacc

SEQ ID NO: 6130 - DNA, 20 bp, Homo Sapiens
aacgtggacagccgctaccg

SEQ ID NO: 6131 - DNA, 20 bp, Homo Sapiens
acgtggacagccgctaccgg

SEQ ID NO: 6132 - DNA, 20 bp, Homo Sapiens
cgtggacagccgctaccgga

SEQ ID NO: 6133 - DNA, 20 bp, Homo Sapiens
gtggacagccgctaccggaa

SEQ ID NO: 6134 - DNA, 20 bp, Homo Sapiens
tggacagccgctaccggaac

SEQ ID NO: 6135 - DNA, 20 bp, Homo Sapiens
ggacagccgctaccggaacc

SEQ ID NO: 6136 - DNA, 20 bp, Homo Sapiens
gacagccgctaccggaaccg

SEQ ID NO: 6137 - DNA, 20 bp, Homo Sapiens
acagccgctaccggaaccga

SEQ ID NO: 6138 - DNA, 20 bp, Homo Sapiens
cagccgctaccggaaccgag

SEQ ID NO: 6139 - DNA, 20 bp, Homo Sapiens
agccgctaccggaaccgagc

SEQ ID NO: 6140 - DNA, 20 bp, Homo Sapiens
gccgctaccggaaccgagcc

SEQ ID NO: 6141 - DNA, 20 bp, Homo Sapiens
ccgctaccggaaccgagccc

SEQ ID NO: 6142 - DNA, 20 bp, Homo Sapiens
cgctaccggaaccgagccct

SEQ ID NO: 6143 - DNA, 20 bp, Homo Sapiens
gctaccggaaccgagccctg

SEQ ID NO: 6144 - DNA, 20 bp, Homo Sapiens
ctaccggaaccgagccctga

SEQ ID NO: 6145 - DNA, 20 bp, Homo Sapiens
taccggaaccgagccctgat

SEQ ID NO: 6146 - DNA, 20 bp, Homo Sapiens
accggaaccgagccctgatg

SEQ ID NO: 6147 - DNA, 20 bp, Homo Sapiens
ccggaaccgagccctgatgt

SEQ ID NO: 6148 - DNA, 20 bp, Homo Sapiens
cggaaccgagccctgatgtc

SEQ ID NO: 6149 - DNA, 20 bp, Homo Sapiens
ggaaccgagccctgatgtca

SEQ ID NO: 6150 - DNA, 20 bp, Homo Sapiens
gaaccgagccctgatgtcac

SEQ ID NO: 6151 - DNA, 20 bp, Homo Sapiens
aaccgagccctgatgtcacc

SEQ ID NO: 6152 - DNA, 20 bp, Homo Sapiens
accgagccctgatgtcaccg

SEQ ID NO: 6153 - DNA, 20 bp, Homo Sapiens
ccgagccctgatgtcaccgg

SEQ ID NO: 6154 - DNA, 20 bp, Homo Sapiens
cgagccctgatgtcaccggc

SEQ ID NO: 6155 - DNA, 20 bp, Homo Sapiens
gagccctgatgtcaccggcc

SEQ ID NO: 6156 - DNA, 20 bp, Homo Sapiens
agccctgatgtcaccggccg

SEQ ID NO: 6157 - DNA, 20 bp, Homo Sapiens
gccctgatgtcaccggccgg

SEQ ID NO: 6158 - DNA, 20 bp, Homo Sapiens
ccctgatgtcaccggccggc

SEQ ID NO: 6159 - DNA, 20 bp, Homo Sapiens
cctgatgtcaccggccggca

SEQ ID NO: 6160 - DNA, 20 bp, Homo Sapiens
ctgatgtcaccggccggcat

SEQ ID NO: 6161 - DNA, 20 bp, Homo Sapiens
tgatgtcaccggccggcatg

SEQ ID NO: 6162 - DNA, 20 bp, Homo Sapiens
gatgtcaccggccggcatgc

SEQ ID NO: 6163 - DNA, 20 bp, Homo Sapiens
atgtcaccggccggcatgct

SEQ ID NO: 6164 - DNA, 20 bp, Homo Sapiens
tgtcaccggccggcatgctg

SEQ ID NO: 6165 - DNA, 20 bp, Homo Sapiens
gtcaccggccggcatgctgc

SEQ ID NO: 6166 - DNA, 20 bp, Homo Sapiens
tcaccggccggcatgctgcg

SEQ ID NO: 6167 - DNA, 20 bp, Homo Sapiens
caccggccggcatgctgcgg

SEQ ID NO: 6168 - DNA, 20 bp, Homo Sapiens
accggccggcatgctgcggg

SEQ ID NO: 6169 - DNA, 20 bp, Homo Sapiens
ccggccggcatgctgcgggg

SEQ ID NO: 6170 - DNA, 20 bp, Homo Sapiens
cggccggcatgctgcggggc

SEQ ID NO: 6171 - DNA, 20 bp, Homo Sapiens
ggccggcatgctgcggggcg

SEQ ID NO: 6172 - DNA, 20 bp, Homo Sapiens
gccggcatgctgcggggcga

SEQ ID NO: 6173 - DNA, 20 bp, Homo Sapiens
ccggcatgctgcggggcgac

SEQ ID NO: 6174 - DNA, 20 bp, Homo Sapiens
cggcatgctgcggggcgact

SEQ ID NO: 6175 - DNA, 20 bp, Homo Sapiens
ggcatgctgcggggcgactt

SEQ ID NO: 6176 - DNA, 20 bp, Homo Sapiens
gcatgctgcggggcgacttc

SEQ ID NO: 6177 - DNA, 20 bp, Homo Sapiens
catgctgcggggcgacttct

SEQ ID NO: 6178 - DNA, 20 bp, Homo Sapiens
atgctgcggggcgacttctc

SEQ ID NO: 6179 - DNA, 20 bp, Homo Sapiens
tgctgcggggcgacttctcc

SEQ ID NO: 6180 - DNA, 20 bp, Homo Sapiens
gctgcggggcgacttctccc

SEQ ID NO: 6181 - DNA, 20 bp, Homo Sapiens
ctgcggggcgacttctccct

SEQ ID NO: 6182 - DNA, 20 bp, Homo Sapiens
tgcggggcgacttctccctg

SEQ ID NO: 6183 - DNA, 20 bp, Homo Sapiens
gcggggcgacttctccctgc

SEQ ID NO: 6184 - DNA, 20 bp, Homo Sapiens
cggggcgacttctccctgcg

SEQ ID NO: 6185 - DNA, 20 bp, Homo Sapiens
ggggcgacttctccctgcgc

SEQ ID NO: 6186 - DNA, 20 bp, Homo Sapiens
gggcgacttctccctgcgct

SEQ ID NO: 6187 - DNA, 20 bp, Homo Sapiens
ggcgacttctccctgcgctt

SEQ ID NO: 6188 - DNA, 20 bp, Homo Sapiens
gcgacttctccctgcgcttg

SEQ ID NO: 6189 - DNA, 20 bp, Homo Sapiens
cgacttctccctgcgcttgt

SEQ ID NO: 6190 - DNA, 20 bp, Homo Sapiens
gacttctccctgcgcttgtt

SEQ ID NO: 6191 - DNA, 20 bp, Homo Sapiens
acttctccctgcgcttgttc

SEQ ID NO: 6192 - DNA, 20 bp, Homo Sapiens
cttctccctgcgcttgttca

SEQ ID NO: 6193 - DNA, 20 bp, Homo Sapiens
ttctccctgcgcttgttcaa

SEQ ID NO: 6194 - DNA, 20 bp, Homo Sapiens
tctccctgcgcttgttcaac

SEQ ID NO: 6195 - DNA, 20 bp, Homo Sapiens
ctccctgcgcttgttcaacg

SEQ ID NO: 6196 - DNA, 20 bp, Homo Sapiens
tccctgcgcttgttcaacgt

SEQ ID NO: 6197 - DNA, 20 bp, Homo Sapiens
ccctgcgcttgttcaacgtc

SEQ ID NO: 6198 - DNA, 20 bp, Homo Sapiens
cctgcgcttgttcaacgtca

SEQ ID NO: 6199 - DNA, 20 bp, Homo Sapiens
ctgcgcttgttcaacgtcac

SEQ ID NO: 6200 - DNA, 20 bp, Homo Sapiens
tgcgcttgttcaacgtcacc

SEQ ID NO: 6201 - DNA, 20 bp, Homo Sapiens
gcgcttgttcaacgtcaccc

SEQ ID NO: 6202 - DNA, 20 bp, Homo Sapiens
cgcttgttcaacgtcacccc

SEQ ID NO: 6203 - DNA, 20 bp, Homo Sapiens
gcttgttcaacgtcaccccc

SEQ ID NO: 6204 - DNA, 20 bp, Homo Sapiens
cttgttcaacgtcacccccc

SEQ ID NO: 6205 - DNA, 20 bp, Homo Sapiens
ttgttcaacgtcacccccca

SEQ ID NO: 6206 - DNA, 20 bp, Homo Sapiens
tgttcaacgtcaccccccag

SEQ ID NO: 6207 - DNA, 20 bp, Homo Sapiens
gttcaacgtcaccccccagg

SEQ ID NO: 6208 - DNA, 20 bp, Homo Sapiens
ttcaacgtcaccccccagga

SEQ ID NO: 6209 - DNA, 20 bp, Homo Sapiens
tcaacgtcaccccccaggac

SEQ ID NO: 6210 - DNA, 20 bp, Homo Sapiens
caacgtcaccccccaggacg

SEQ ID NO: 6211 - DNA, 20 bp, Homo Sapiens
aacgtcaccccccaggacga

SEQ ID NO: 6212 - DNA, 20 bp, Homo Sapiens
acgtcaccccccaggacgag

SEQ ID NO: 6213 - DNA, 20 bp, Homo Sapiens
cgtcaccccccaggacgagc

SEQ ID NO: 6214 - DNA, 20 bp, Homo Sapiens
gtcaccccccaggacgagca

SEQ ID NO: 6215 - DNA, 20 bp, Homo Sapiens
tcaccccccaggacgagcag

SEQ ID NO: 6216 - DNA, 20 bp, Homo Sapiens
caccccccaggacgagcaga

SEQ ID NO: 6217 - DNA, 20 bp, Homo Sapiens
accccccaggacgagcagaa

SEQ ID NO: 6218 - DNA, 20 bp, Homo Sapiens
ccccccaggacgagcagaag

SEQ ID NO: 6219 - DNA, 20 bp, Homo Sapiens
cccccaggacgagcagaagt

SEQ ID NO: 6220 - DNA, 20 bp, Homo Sapiens
ccccaggacgagcagaagtt

SEQ ID NO: 6221 - DNA, 20 bp, Homo Sapiens
cccaggacgagcagaagttt

SEQ ID NO: 6222 - DNA, 20 bp, Homo Sapiens
ccaggacgagcagaagtttc

SEQ ID NO: 6223 - DNA, 20 bp, Homo Sapiens
caggacgagcagaagtttca

SEQ ID NO: 6224 - DNA, 20 bp, Homo Sapiens
aggacgagcagaagtttcac

SEQ ID NO: 6225 - DNA, 20 bp, Homo Sapiens
ggacgagcagaagtttcact

SEQ ID NO: 6226 - DNA, 20 bp, Homo Sapiens
gacgagcagaagtttcactg

SEQ ID NO: 6227 - DNA, 20 bp, Homo Sapiens
acgagcagaagtttcactgc

SEQ ID NO: 6228 - DNA, 20 bp, Homo Sapiens
cgagcagaagtttcactgcc

SEQ ID NO: 6229 - DNA, 20 bp, Homo Sapiens
gagcagaagtttcactgcct

SEQ ID NO: 6230 - DNA, 20 bp, Homo Sapiens
agcagaagtttcactgcctg

SEQ ID NO: 6231 - DNA, 20 bp, Homo Sapiens
gcagaagtttcactgcctgg

SEQ ID NO: 6232 - DNA, 20 bp, Homo Sapiens
cagaagtttcactgcctggt

SEQ ID NO: 6233 - DNA, 20 bp, Homo Sapiens
agaagtttcactgcctggtg

SEQ ID NO: 6234 - DNA, 20 bp, Homo Sapiens
gaagtttcactgcctggtgt

SEQ ID NO: 6235 - DNA, 20 bp, Homo Sapiens
aagtttcactgcctggtgtt

SEQ ID NO: 6236 - DNA, 20 bp, Homo Sapiens
agtttcactgcctggtgttg

SEQ ID NO: 6237 - DNA, 20 bp, Homo Sapiens
gtttcactgcctggtgttga

SEQ ID NO: 6238 - DNA, 20 bp, Homo Sapiens
tttcactgcctggtgttgag

SEQ ID NO: 6239 - DNA, 20 bp, Homo Sapiens
ttcactgcctggtgttgagc

SEQ ID NO: 6240 - DNA, 20 bp, Homo Sapiens
tcactgcctggtgttgagcc

SEQ ID NO: 6241 - DNA, 20 bp, Homo Sapiens
cactgcctggtgttgagcca

SEQ ID NO: 6242 - DNA, 20 bp, Homo Sapiens
actgcctggtgttgagccaa

SEQ ID NO: 6243 - DNA, 20 bp, Homo Sapiens
ctgcctggtgttgagccaat

SEQ ID NO: 6244 - DNA, 20 bp, Homo Sapiens
tgcctggtgttgagccaatc

SEQ ID NO: 6245 - DNA, 20 bp, Homo Sapiens
gcctggtgttgagccaatcc

SEQ ID NO: 6246 - DNA, 20 bp, Homo Sapiens
cctggtgttgagccaatccc

SEQ ID NO: 6247 - DNA, 20 bp, Homo Sapiens
ctggtgttgagccaatccct

SEQ ID NO: 6248 - DNA, 20 bp, Homo Sapiens
tggtgttgagccaatccctg

SEQ ID NO: 6249 - DNA, 20 bp, Homo Sapiens
ggtgttgagccaatccctgg

SEQ ID NO: 6250 - DNA, 20 bp, Homo Sapiens
gtgttgagccaatccctggg

SEQ ID NO: 6251 - DNA, 20 bp, Homo Sapiens
tgttgagccaatccctggga

SEQ ID NO: 6252 - DNA, 20 bp, Homo Sapiens
gttgagccaatccctgggat

SEQ ID NO: 6253 - DNA, 20 bp, Homo Sapiens
ttgagccaatccctgggatt

SEQ ID NO: 6254 - DNA, 20 bp, Homo Sapiens
tgagccaatccctgggattc

SEQ ID NO: 6255 - DNA, 20 bp, Homo Sapiens
gagccaatccctgggattcc

SEQ ID NO: 6256 - DNA, 20 bp, Homo Sapiens
agccaatccctgggattcca

SEQ ID NO: 6257 - DNA, 20 bp, Homo Sapiens
gccaatccctgggattccag

SEQ ID NO: 6258 - DNA, 20 bp, Homo Sapiens
ccaatccctgggattccagg

SEQ ID NO: 6259 - DNA, 20 bp, Homo Sapiens
caatccctgggattccagga

SEQ ID NO: 6260 - DNA, 20 bp, Homo Sapiens
aatccctgggattccaggag

SEQ ID NO: 6261 - DNA, 20 bp, Homo Sapiens
atccctgggattccaggagg

SEQ ID NO: 6262 - DNA, 20 bp, Homo Sapiens
tccctgggattccaggaggt

SEQ ID NO: 6263 - DNA, 20 bp, Homo Sapiens
ccctgggattccaggaggtt

SEQ ID NO: 6264 - DNA, 20 bp, Homo Sapiens
cctgggattccaggaggttt

SEQ ID NO: 6265 - DNA, 20 bp, Homo Sapiens
ctgggattccaggaggtttt

SEQ ID NO: 6266 - DNA, 20 bp, Homo Sapiens
tgggattccaggaggttttg

SEQ ID NO: 6267 - DNA, 20 bp, Homo Sapiens
gggattccaggaggttttga

SEQ ID NO: 6268 - DNA, 20 bp, Homo Sapiens
ggattccaggaggttttgag

SEQ ID NO: 6269 - DNA, 20 bp, Homo Sapiens
gattccaggaggttttgagc

SEQ ID NO: 6270 - DNA, 20 bp, Homo Sapiens
attccaggaggttttgagcg

SEQ ID NO: 6271 - DNA, 20 bp, Homo Sapiens
ttccaggaggttttgagcgt

SEQ ID NO: 6272 - DNA, 20 bp, Homo Sapiens
tccaggaggttttgagcgtt

SEQ ID NO: 6273 - DNA, 20 bp, Homo Sapiens
ccaggaggttttgagcgttg

SEQ ID NO: 6274 - DNA, 20 bp, Homo Sapiens
caggaggttttgagcgttga

SEQ ID NO: 6275 - DNA, 20 bp, Homo Sapiens
aggaggttttgagcgttgag

SEQ ID NO: 6276 - DNA, 20 bp, Homo Sapiens
ggaggttttgagcgttgagg

SEQ ID NO: 6277 - DNA, 20 bp, Homo Sapiens
gaggttttgagcgttgaggt

SEQ ID NO: 6278 - DNA, 20 bp, Homo Sapiens
aggttttgagcgttgaggtt

SEQ ID NO: 6279 - DNA, 20 bp, Homo Sapiens
ggttttgagcgttgaggtta

SEQ ID NO: 6280 - DNA, 20 bp, Homo Sapiens
gttttgagcgttgaggttac

SEQ ID NO: 6281 - DNA, 20 bp, Homo Sapiens
ttttgagcgttgaggttaca

SEQ ID NO: 6282 - DNA, 20 bp, Homo Sapiens
tttgagcgttgaggttacac

SEQ ID NO: 6283 - DNA, 20 bp, Homo Sapiens
ttgagcgttgaggttacact

SEQ ID NO: 6284 - DNA, 20 bp, Homo Sapiens
tgagcgttgaggttacactg

SEQ ID NO: 6285 - DNA, 20 bp, Homo Sapiens
gagcgttgaggttacactgc

SEQ ID NO: 6286 - DNA, 20 bp, Homo Sapiens
agcgttgaggttacactgca

SEQ ID NO: 6287 - DNA, 20 bp, Homo Sapiens
gcgttgaggttacactgcat

SEQ ID NO: 6288 - DNA, 20 bp, Homo Sapiens
cgttgaggttacactgcatg

SEQ ID NO: 6289 - DNA, 20 bp, Homo Sapiens
gttgaggttacactgcatgt

SEQ ID NO: 6290 - DNA, 20 bp, Homo Sapiens
ttgaggttacactgcatgtg

SEQ ID NO: 6291 - DNA, 20 bp, Homo Sapiens
tgaggttacactgcatgtgg

SEQ ID NO: 6292 - DNA, 20 bp, Homo Sapiens
gaggttacactgcatgtggc

SEQ ID NO: 6293 - DNA, 20 bp, Homo Sapiens
aggttacactgcatgtggca

SEQ ID NO: 6294 - DNA, 20 bp, Homo Sapiens
ggttacactgcatgtggcag

SEQ ID NO: 6295 - DNA, 20 bp, Homo Sapiens
gttacactgcatgtggcagc

SEQ ID NO: 6296 - DNA, 20 bp, Homo Sapiens
ttacactgcatgtggcagca

SEQ ID NO: 6297 - DNA, 20 bp, Homo Sapiens
tacactgcatgtggcagcaa

SEQ ID NO: 6298 - DNA, 20 bp, Homo Sapiens
acactgcatgtggcagcaaa

SEQ ID NO: 6299 - DNA, 20 bp, Homo Sapiens
cactgcatgtggcagcaaac

SEQ ID NO: 6300 - DNA, 20 bp, Homo Sapiens
actgcatgtggcagcaaact

SEQ ID NO: 6301 - DNA, 20 bp, Homo Sapiens
ctgcatgtggcagcaaactt

SEQ ID NO: 6302 - DNA, 20 bp, Homo Sapiens
tgcatgtggcagcaaacttc

SEQ ID NO: 6303 - DNA, 20 bp, Homo Sapiens
gcatgtggcagcaaacttca

SEQ ID NO: 6304 - DNA, 20 bp, Homo Sapiens
catgtggcagcaaacttcag

SEQ ID NO: 6305 - DNA, 20 bp, Homo Sapiens
atgtggcagcaaacttcagc

SEQ ID NO: 6306 - DNA, 20 bp, Homo Sapiens
tgtggcagcaaacttcagcg

SEQ ID NO: 6307 - DNA, 20 bp, Homo Sapiens
gtggcagcaaacttcagcgt

SEQ ID NO: 6308 - DNA, 20 bp, Homo Sapiens
tggcagcaaacttcagcgtg

SEQ ID NO: 6309 - DNA, 20 bp, Homo Sapiens
ggcagcaaacttcagcgtgc

SEQ ID NO: 6310 - DNA, 20 bp, Homo Sapiens
gcagcaaacttcagcgtgcc

SEQ ID NO: 6311 - DNA, 20 bp, Homo Sapiens
cagcaaacttcagcgtgccc

SEQ ID NO: 6312 - DNA, 20 bp, Homo Sapiens
agcaaacttcagcgtgcccg

SEQ ID NO: 6313 - DNA, 20 bp, Homo Sapiens
gcaaacttcagcgtgcccgt

SEQ ID NO: 6314 - DNA, 20 bp, Homo Sapiens
caaacttcagcgtgcccgtc

SEQ ID NO: 6315 - DNA, 20 bp, Homo Sapiens
aaacttcagcgtgcccgtcg

SEQ ID NO: 6316 - DNA, 20 bp, Homo Sapiens
aacttcagcgtgcccgtcgt

SEQ ID NO: 6317 - DNA, 20 bp, Homo Sapiens
acttcagcgtgcccgtcgtc

SEQ ID NO: 6318 - DNA, 20 bp, Homo Sapiens
cttcagcgtgcccgtcgtca

SEQ ID NO: 6319 - DNA, 20 bp, Homo Sapiens
ttcagcgtgcccgtcgtcag

SEQ ID NO: 6320 - DNA, 20 bp, Homo Sapiens
tcagcgtgcccgtcgtcagc

SEQ ID NO: 6321 - DNA, 20 bp, Homo Sapiens
cagcgtgcccgtcgtcagcg

SEQ ID NO: 6322 - DNA, 20 bp, Homo Sapiens
agcgtgcccgtcgtcagcgc

SEQ ID NO: 6323 - DNA, 20 bp, Homo Sapiens
gcgtgcccgtcgtcagcgcc

SEQ ID NO: 6324 - DNA, 20 bp, Homo Sapiens
cgtgcccgtcgtcagcgccc

SEQ ID NO: 6325 - DNA, 20 bp, Homo Sapiens
gtgcccgtcgtcagcgcccc

SEQ ID NO: 6326 - DNA, 20 bp, Homo Sapiens
tgcccgtcgtcagcgccccc

SEQ ID NO: 6327 - DNA, 20 bp, Homo Sapiens
gcccgtcgtcagcgcccccc

SEQ ID NO: 6328 - DNA, 20 bp, Homo Sapiens
cccgtcgtcagcgcccccca

SEQ ID NO: 6329 - DNA, 20 bp, Homo Sapiens
ccgtcgtcagcgccccccac

SEQ ID NO: 6330 - DNA, 20 bp, Homo Sapiens
cgtcgtcagcgccccccaca

SEQ ID NO: 6331 - DNA, 20 bp, Homo Sapiens
gtcgtcagcgccccccacag

SEQ ID NO: 6332 - DNA, 20 bp, Homo Sapiens
tcgtcagcgccccccacagc

SEQ ID NO: 6333 - DNA, 20 bp, Homo Sapiens
cgtcagcgccccccacagcc

SEQ ID NO: 6334 - DNA, 20 bp, Homo Sapiens
gtcagcgccccccacagccc

SEQ ID NO: 6335 - DNA, 20 bp, Homo Sapiens
tcagcgccccccacagcccc

SEQ ID NO: 6336 - DNA, 20 bp, Homo Sapiens
cagcgccccccacagcccct

SEQ ID NO: 6337 - DNA, 20 bp, Homo Sapiens
agcgccccccacagcccctc

SEQ ID NO: 6338 - DNA, 20 bp, Homo Sapiens
gcgccccccacagcccctcc

SEQ ID NO: 6339 - DNA, 20 bp, Homo Sapiens
cgccccccacagcccctccc

SEQ ID NO: 6340 - DNA, 20 bp, Homo Sapiens
gccccccacagcccctccca

SEQ ID NO: 6341 - DNA, 20 bp, Homo Sapiens
ccccccacagcccctcccag

SEQ ID NO: 6342 - DNA, 20 bp, Homo Sapiens
cccccacagcccctcccagg

SEQ ID NO: 6343 - DNA, 20 bp, Homo Sapiens
ccccacagcccctcccagga

SEQ ID NO: 6344 - DNA, 20 bp, Homo Sapiens
cccacagcccctcccaggat

SEQ ID NO: 6345 - DNA, 20 bp, Homo Sapiens
ccacagcccctcccaggatg

SEQ ID NO: 6346 - DNA, 20 bp, Homo Sapiens
cacagcccctcccaggatga

SEQ ID NO: 6347 - DNA, 20 bp, Homo Sapiens
acagcccctcccaggatgag

SEQ ID NO: 6348 - DNA, 20 bp, Homo Sapiens
cagcccctcccaggatgagc

SEQ ID NO: 6349 - DNA, 20 bp, Homo Sapiens
agcccctcccaggatgagct

SEQ ID NO: 6350 - DNA, 20 bp, Homo Sapiens
gcccctcccaggatgagctc

SEQ ID NO: 6351 - DNA, 20 bp, Homo Sapiens
cccctcccaggatgagctca

SEQ ID NO: 6352 - DNA, 20 bp, Homo Sapiens
ccctcccaggatgagctcac

SEQ ID NO: 6353 - DNA, 20 bp, Homo Sapiens
cctcccaggatgagctcacc

SEQ ID NO: 6354 - DNA, 20 bp, Homo Sapiens
ctcccaggatgagctcacct

SEQ ID NO: 6355 - DNA, 20 bp, Homo Sapiens
tcccaggatgagctcacctt

SEQ ID NO: 6356 - DNA, 20 bp, Homo Sapiens
cccaggatgagctcaccttc

SEQ ID NO: 6357 - DNA, 20 bp, Homo Sapiens
ccaggatgagctcaccttca

SEQ ID NO: 6358 - DNA, 20 bp, Homo Sapiens
caggatgagctcaccttcac

SEQ ID NO: 6359 - DNA, 20 bp, Homo Sapiens
aggatgagctcaccttcacg

SEQ ID NO: 6360 - DNA, 20 bp, Homo Sapiens
ggatgagctcaccttcacgt

SEQ ID NO: 6361 - DNA, 20 bp, Homo Sapiens
gatgagctcaccttcacgtg

SEQ ID NO: 6362 - DNA, 20 bp, Homo Sapiens
atgagctcaccttcacgtgt

SEQ ID NO: 6363 - DNA, 20 bp, Homo Sapiens
tgagctcaccttcacgtgta

SEQ ID NO: 6364 - DNA, 20 bp, Homo Sapiens
gagctcaccttcacgtgtac

SEQ ID NO: 6365 - DNA, 20 bp, Homo Sapiens
agctcaccttcacgtgtaca

SEQ ID NO: 6366 - DNA, 20 bp, Homo Sapiens
gctcaccttcacgtgtacat

SEQ ID NO: 6367 - DNA, 20 bp, Homo Sapiens
ctcaccttcacgtgtacatc

SEQ ID NO: 6368 - DNA, 20 bp, Homo Sapiens
tcaccttcacgtgtacatcc

SEQ ID NO: 6369 - DNA, 20 bp, Homo Sapiens
caccttcacgtgtacatcca

SEQ ID NO: 6370 - DNA, 20 bp, Homo Sapiens
accttcacgtgtacatccat

SEQ ID NO: 6371 - DNA, 20 bp, Homo Sapiens
ccttcacgtgtacatccata

SEQ ID NO: 6372 - DNA, 20 bp, Homo Sapiens
cttcacgtgtacatccataa

SEQ ID NO: 6373 - DNA, 20 bp, Homo Sapiens
ttcacgtgtacatccataaa

SEQ ID NO: 6374 - DNA, 20 bp, Homo Sapiens
tcacgtgtacatccataaac

SEQ ID NO: 6375 - DNA, 20 bp, Homo Sapiens
cacgtgtacatccataaacg

SEQ ID NO: 6376 - DNA, 20 bp, Homo Sapiens
acgtgtacatccataaacgg

SEQ ID NO: 6377 - DNA, 20 bp, Homo Sapiens
cgtgtacatccataaacggc

SEQ ID NO: 6378 - DNA, 20 bp, Homo Sapiens
gtgtacatccataaacggct

SEQ ID NO: 6379 - DNA, 20 bp, Homo Sapiens
tgtacatccataaacggcta

SEQ ID NO: 6380 - DNA, 20 bp, Homo Sapiens
gtacatccataaacggctac

SEQ ID NO: 6381 - DNA, 20 bp, Homo Sapiens
tacatccataaacggctacc

SEQ ID NO: 6382 - DNA, 20 bp, Homo Sapiens
acatccataaacggctaccc

SEQ ID NO: 6383 - DNA, 20 bp, Homo Sapiens
catccataaacggctacccc

SEQ ID NO: 6384 - DNA, 20 bp, Homo Sapiens
atccataaacggctacccca

SEQ ID NO: 6385 - DNA, 20 bp, Homo Sapiens
tccataaacggctaccccag

SEQ ID NO: 6386 - DNA, 20 bp, Homo Sapiens
ccataaacggctaccccagg

SEQ ID NO: 6387 - DNA, 20 bp, Homo Sapiens
cataaacggctaccccaggc

SEQ ID NO: 6388 - DNA, 20 bp, Homo Sapiens
ataaacggctaccccaggcc

SEQ ID NO: 6389 - DNA, 20 bp, Homo Sapiens
taaacggctaccccaggccc

SEQ ID NO: 6390 - DNA, 20 bp, Homo Sapiens
aaacggctaccccaggccca

SEQ ID NO: 6391 - DNA, 20 bp, Homo Sapiens
aacggctaccccaggcccaa

SEQ ID NO: 6392 - DNA, 20 bp, Homo Sapiens
acggctaccccaggcccaac

SEQ ID NO: 6393 - DNA, 20 bp, Homo Sapiens
cggctaccccaggcccaacg

SEQ ID NO: 6394 - DNA, 20 bp, Homo Sapiens
ggctaccccaggcccaacgt

SEQ ID NO: 6395 - DNA, 20 bp, Homo Sapiens
gctaccccaggcccaacgtg

SEQ ID NO: 6396 - DNA, 20 bp, Homo Sapiens
ctaccccaggcccaacgtgt

SEQ ID NO: 6397 - DNA, 20 bp, Homo Sapiens
taccccaggcccaacgtgta

SEQ ID NO: 6398 - DNA, 20 bp, Homo Sapiens
accccaggcccaacgtgtac

SEQ ID NO: 6399 - DNA, 20 bp, Homo Sapiens
ccccaggcccaacgtgtact

SEQ ID NO: 6400 - DNA, 20 bp, Homo Sapiens
cccaggcccaacgtgtactg

SEQ ID NO: 6401 - DNA, 20 bp, Homo Sapiens
ccaggcccaacgtgtactgg

SEQ ID NO: 6402 - DNA, 20 bp, Homo Sapiens
caggcccaacgtgtactgga

SEQ ID NO: 6403 - DNA, 20 bp, Homo Sapiens
aggcccaacgtgtactggat

SEQ ID NO: 6404 - DNA, 20 bp, Homo Sapiens
ggcccaacgtgtactggatc

SEQ ID NO: 6405 - DNA, 20 bp, Homo Sapiens
gcccaacgtgtactggatca

SEQ ID NO: 6406 - DNA, 20 bp, Homo Sapiens
cccaacgtgtactggatcaa

SEQ ID NO: 6407 - DNA, 20 bp, Homo Sapiens
ccaacgtgtactggatcaat

SEQ ID NO: 6408 - DNA, 20 bp, Homo Sapiens
caacgtgtactggatcaata

SEQ ID NO: 6409 - DNA, 20 bp, Homo Sapiens
aacgtgtactggatcaataa

SEQ ID NO: 6410 - DNA, 20 bp, Homo Sapiens
acgtgtactggatcaataag

SEQ ID NO: 6411 - DNA, 20 bp, Homo Sapiens
cgtgtactggatcaataaga

SEQ ID NO: 6412 - DNA, 20 bp, Homo Sapiens
gtgtactggatcaataagac

SEQ ID NO: 6413 - DNA, 20 bp, Homo Sapiens
tgtactggatcaataagacg

SEQ ID NO: 6414 - DNA, 20 bp, Homo Sapiens
gtactggatcaataagacgg

SEQ ID NO: 6415 - DNA, 20 bp, Homo Sapiens
tactggatcaataagacgga

SEQ ID NO: 6416 - DNA, 20 bp, Homo Sapiens
actggatcaataagacggac

SEQ ID NO: 6417 - DNA, 20 bp, Homo Sapiens
ctggatcaataagacggaca

SEQ ID NO: 6418 - DNA, 20 bp, Homo Sapiens
tggatcaataagacggacaa

SEQ ID NO: 6419 - DNA, 20 bp, Homo Sapiens
ggatcaataagacggacaac

SEQ ID NO: 6420 - DNA, 20 bp, Homo Sapiens
gatcaataagacggacaaca

SEQ ID NO: 6421 - DNA, 20 bp, Homo Sapiens
atcaataagacggacaacag

SEQ ID NO: 6422 - DNA, 20 bp, Homo Sapiens
tcaataagacggacaacagc

SEQ ID NO: 6423 - DNA, 20 bp, Homo Sapiens
caataagacggacaacagcc

SEQ ID NO: 6424 - DNA, 20 bp, Homo Sapiens
aataagacggacaacagcct

SEQ ID NO: 6425 - DNA, 20 bp, Homo Sapiens
ataagacggacaacagcctg

SEQ ID NO: 6426 - DNA, 20 bp, Homo Sapiens
taagacggacaacagcctgc

SEQ ID NO: 6427 - DNA, 20 bp, Homo Sapiens
aagacggacaacagcctgct

SEQ ID NO: 6428 - DNA, 20 bp, Homo Sapiens
agacggacaacagcctgctg

SEQ ID NO: 6429 - DNA, 20 bp, Homo Sapiens
gacggacaacagcctgctgg

SEQ ID NO: 6430 - DNA, 20 bp, Homo Sapiens
acggacaacagcctgctgga

SEQ ID NO: 6431 - DNA, 20 bp, Homo Sapiens
cggacaacagcctgctggac

SEQ ID NO: 6432 - DNA, 20 bp, Homo Sapiens
ggacaacagcctgctggacc

SEQ ID NO: 6433 - DNA, 20 bp, Homo Sapiens
gacaacagcctgctggacca

SEQ ID NO: 6434 - DNA, 20 bp, Homo Sapiens
acaacagcctgctggaccag

SEQ ID NO: 6435 - DNA, 20 bp, Homo Sapiens
caacagcctgctggaccagg

SEQ ID NO: 6436 - DNA, 20 bp, Homo Sapiens
aacagcctgctggaccaggc

SEQ ID NO: 6437 - DNA, 20 bp, Homo Sapiens
acagcctgctggaccaggct

SEQ ID NO: 6438 - DNA, 20 bp, Homo Sapiens
cagcctgctggaccaggctc

SEQ ID NO: 6439 - DNA, 20 bp, Homo Sapiens
agcctgctggaccaggctct

SEQ ID NO: 6440 - DNA, 20 bp, Homo Sapiens
gcctgctggaccaggctctg

SEQ ID NO: 6441 - DNA, 20 bp, Homo Sapiens
cctgctggaccaggctctgc

SEQ ID NO: 6442 - DNA, 20 bp, Homo Sapiens
ctgctggaccaggctctgca

SEQ ID NO: 6443 - DNA, 20 bp, Homo Sapiens
tgctggaccaggctctgcag

SEQ ID NO: 6444 - DNA, 20 bp, Homo Sapiens
gctggaccaggctctgcaga

SEQ ID NO: 6445 - DNA, 20 bp, Homo Sapiens
ctggaccaggctctgcagaa

SEQ ID NO: 6446 - DNA, 20 bp, Homo Sapiens
tggaccaggctctgcagaat

SEQ ID NO: 6447 - DNA, 20 bp, Homo Sapiens
ggaccaggctctgcagaatg

SEQ ID NO: 6448 - DNA, 20 bp, Homo Sapiens
gaccaggctctgcagaatga

SEQ ID NO: 6449 - DNA, 20 bp, Homo Sapiens
accaggctctgcagaatgac

SEQ ID NO: 6450 - DNA, 20 bp, Homo Sapiens
ccaggctctgcagaatgaca

SEQ ID NO: 6451 - DNA, 20 bp, Homo Sapiens
caggctctgcagaatgacac

SEQ ID NO: 6452 - DNA, 20 bp, Homo Sapiens
aggctctgcagaatgacacc

SEQ ID NO: 6453 - DNA, 20 bp, Homo Sapiens
ggctctgcagaatgacaccg

SEQ ID NO: 6454 - DNA, 20 bp, Homo Sapiens
gctctgcagaatgacaccgt

SEQ ID NO: 6455 - DNA, 20 bp, Homo Sapiens
ctctgcagaatgacaccgtc

SEQ ID NO: 6456 - DNA, 20 bp, Homo Sapiens
tctgcagaatgacaccgtct

SEQ ID NO: 6457 - DNA, 20 bp, Homo Sapiens
ctgcagaatgacaccgtctt

SEQ ID NO: 6458 - DNA, 20 bp, Homo Sapiens
tgcagaatgacaccgtcttc

SEQ ID NO: 6459 - DNA, 20 bp, Homo Sapiens
gcagaatgacaccgtcttct

SEQ ID NO: 6460 - DNA, 20 bp, Homo Sapiens
cagaatgacaccgtcttctt

SEQ ID NO: 6461 - DNA, 20 bp, Homo Sapiens
agaatgacaccgtcttcttg

SEQ ID NO: 6462 - DNA, 20 bp, Homo Sapiens
gaatgacaccgtcttcttga

SEQ ID NO: 6463 - DNA, 20 bp, Homo Sapiens
aatgacaccgtcttcttgaa

SEQ ID NO: 6464 - DNA, 20 bp, Homo Sapiens
atgacaccgtcttcttgaac

SEQ ID NO: 6465 - DNA, 20 bp, Homo Sapiens
tgacaccgtcttcttgaaca

SEQ ID NO: 6466 - DNA, 20 bp, Homo Sapiens
gacaccgtcttcttgaacat

SEQ ID NO: 6467 - DNA, 20 bp, Homo Sapiens
acaccgtcttcttgaacatg

SEQ ID NO: 6468 - DNA, 20 bp, Homo Sapiens
caccgtcttcttgaacatgc

SEQ ID NO: 6469 - DNA, 20 bp, Homo Sapiens
accgtcttcttgaacatgcg

SEQ ID NO: 6470 - DNA, 20 bp, Homo Sapiens
ccgtcttcttgaacatgcgg

SEQ ID NO: 6471 - DNA, 20 bp, Homo Sapiens
cgtcttcttgaacatgcggg

SEQ ID NO: 6472 - DNA, 20 bp, Homo Sapiens
gtcttcttgaacatgcgggg

SEQ ID NO: 6473 - DNA, 20 bp, Homo Sapiens
tcttcttgaacatgcggggc

SEQ ID NO: 6474 - DNA, 20 bp, Homo Sapiens
cttcttgaacatgcggggct

SEQ ID NO: 6475 - DNA, 20 bp, Homo Sapiens
ttcttgaacatgcggggctt

SEQ ID NO: 6476 - DNA, 20 bp, Homo Sapiens
tcttgaacatgcggggcttg

SEQ ID NO: 6477 - DNA, 20 bp, Homo Sapiens
cttgaacatgcggggcttgt

SEQ ID NO: 6478 - DNA, 20 bp, Homo Sapiens
ttgaacatgcggggcttgta

SEQ ID NO: 6479 - DNA, 20 bp, Homo Sapiens
tgaacatgcggggcttgtat

SEQ ID NO: 6480 - DNA, 20 bp, Homo Sapiens
gaacatgcggggcttgtatg

SEQ ID NO: 6481 - DNA, 20 bp, Homo Sapiens
aacatgcggggcttgtatga

SEQ ID NO: 6482 - DNA, 20 bp, Homo Sapiens
acatgcggggcttgtatgac

SEQ ID NO: 6483 - DNA, 20 bp, Homo Sapiens
catgcggggcttgtatgacg

SEQ ID NO: 6484 - DNA, 20 bp, Homo Sapiens
atgcggggcttgtatgacgt

SEQ ID NO: 6485 - DNA, 20 bp, Homo Sapiens
tgcggggcttgtatgacgtg

SEQ ID NO: 6486 - DNA, 20 bp, Homo Sapiens
gcggggcttgtatgacgtgg

SEQ ID NO: 6487 - DNA, 20 bp, Homo Sapiens
cggggcttgtatgacgtggt

SEQ ID NO: 6488 - DNA, 20 bp, Homo Sapiens
ggggcttgtatgacgtggtc

SEQ ID NO: 6489 - DNA, 20 bp, Homo Sapiens
gggcttgtatgacgtggtca

SEQ ID NO: 6490 - DNA, 20 bp, Homo Sapiens
ggcttgtatgacgtggtcag

SEQ ID NO: 6491 - DNA, 20 bp, Homo Sapiens
gcttgtatgacgtggtcagc

SEQ ID NO: 6492 - DNA, 20 bp, Homo Sapiens
cttgtatgacgtggtcagcg

SEQ ID NO: 6493 - DNA, 20 bp, Homo Sapiens
ttgtatgacgtggtcagcgt

SEQ ID NO: 6494 - DNA, 20 bp, Homo Sapiens
tgtatgacgtggtcagcgtg

SEQ ID NO: 6495 - DNA, 20 bp, Homo Sapiens
gtatgacgtggtcagcgtgc

SEQ ID NO: 6496 - DNA, 20 bp, Homo Sapiens
tatgacgtggtcagcgtgct

SEQ ID NO: 6497 - DNA, 20 bp, Homo Sapiens
atgacgtggtcagcgtgctg

SEQ ID NO: 6498 - DNA, 20 bp, Homo Sapiens
tgacgtggtcagcgtgctga

SEQ ID NO: 6499 - DNA, 20 bp, Homo Sapiens
gacgtggtcagcgtgctgag

SEQ ID NO: 6500 - DNA, 20 bp, Homo Sapiens
acgtggtcagcgtgctgagg

SEQ ID NO: 6501 - DNA, 20 bp, Homo Sapiens
cgtggtcagcgtgctgagga

SEQ ID NO: 6502 - DNA, 20 bp, Homo Sapiens
gtggtcagcgtgctgaggat

SEQ ID NO: 6503 - DNA, 20 bp, Homo Sapiens
tggtcagcgtgctgaggatc

SEQ ID NO: 6504 - DNA, 20 bp, Homo Sapiens
ggtcagcgtgctgaggatcg

SEQ ID NO: 6505 - DNA, 20 bp, Homo Sapiens
gtcagcgtgctgaggatcgc

SEQ ID NO: 6506 - DNA, 20 bp, Homo Sapiens
tcagcgtgctgaggatcgca

SEQ ID NO: 6507 - DNA, 20 bp, Homo Sapiens
cagcgtgctgaggatcgcac

SEQ ID NO: 6508 - DNA, 20 bp, Homo Sapiens
agcgtgctgaggatcgcacg

SEQ ID NO: 6509 - DNA, 20 bp, Homo Sapiens
gcgtgctgaggatcgcacgg

SEQ ID NO: 6510 - DNA, 20 bp, Homo Sapiens
cgtgctgaggatcgcacgga

SEQ ID NO: 6511 - DNA, 20 bp, Homo Sapiens
gtgctgaggatcgcacggac

SEQ ID NO: 6512 - DNA, 20 bp, Homo Sapiens
tgctgaggatcgcacggacc

SEQ ID NO: 6513 - DNA, 20 bp, Homo Sapiens
gctgaggatcgcacggaccc

SEQ ID NO: 6514 - DNA, 20 bp, Homo Sapiens
ctgaggatcgcacggacccc

SEQ ID NO: 6515 - DNA, 20 bp, Homo Sapiens
tgaggatcgcacggaccccc

SEQ ID NO: 6516 - DNA, 20 bp, Homo Sapiens
gaggatcgcacggaccccca

SEQ ID NO: 6517 - DNA, 20 bp, Homo Sapiens
aggatcgcacggacccccag

SEQ ID NO: 6518 - DNA, 20 bp, Homo Sapiens
ggatcgcacggacccccagc

SEQ ID NO: 6519 - DNA, 20 bp, Homo Sapiens
gatcgcacggacccccagcg

SEQ ID NO: 6520 - DNA, 20 bp, Homo Sapiens
atcgcacggacccccagcgt

SEQ ID NO: 6521 - DNA, 20 bp, Homo Sapiens
tcgcacggacccccagcgtg

SEQ ID NO: 6522 - DNA, 20 bp, Homo Sapiens
cgcacggacccccagcgtga

SEQ ID NO: 6523 - DNA, 20 bp, Homo Sapiens
gcacggacccccagcgtgaa

SEQ ID NO: 6524 - DNA, 20 bp, Homo Sapiens
cacggacccccagcgtgaac

SEQ ID NO: 6525 - DNA, 20 bp, Homo Sapiens
acggacccccagcgtgaaca

SEQ ID NO: 6526 - DNA, 20 bp, Homo Sapiens
cggacccccagcgtgaacat

SEQ ID NO: 6527 - DNA, 20 bp, Homo Sapiens
ggacccccagcgtgaacatt

SEQ ID NO: 6528 - DNA, 20 bp, Homo Sapiens
gacccccagcgtgaacattg

SEQ ID NO: 6529 - DNA, 20 bp, Homo Sapiens
acccccagcgtgaacattgg

SEQ ID NO: 6530 - DNA, 20 bp, Homo Sapiens
cccccagcgtgaacattggc

SEQ ID NO: 6531 - DNA, 20 bp, Homo Sapiens
ccccagcgtgaacattggct

SEQ ID NO: 6532 - DNA, 20 bp, Homo Sapiens
cccagcgtgaacattggctg

SEQ ID NO: 6533 - DNA, 20 bp, Homo Sapiens
ccagcgtgaacattggctgc

SEQ ID NO: 6534 - DNA, 20 bp, Homo Sapiens
cagcgtgaacattggctgct

SEQ ID NO: 6535 - DNA, 20 bp, Homo Sapiens
agcgtgaacattggctgctg

SEQ ID NO: 6536 - DNA, 20 bp, Homo Sapiens
gcgtgaacattggctgctgc

SEQ ID NO: 6537 - DNA, 20 bp, Homo Sapiens
cgtgaacattggctgctgca

SEQ ID NO: 6538 - DNA, 20 bp, Homo Sapiens
gtgaacattggctgctgcat

SEQ ID NO: 6539 - DNA, 20 bp, Homo Sapiens
tgaacattggctgctgcata

SEQ ID NO: 6540 - DNA, 20 bp, Homo Sapiens
gaacattggctgctgcatag

SEQ ID NO: 6541 - DNA, 20 bp, Homo Sapiens
aacattggctgctgcataga

SEQ ID NO: 6542 - DNA, 20 bp, Homo Sapiens
acattggctgctgcatagag

SEQ ID NO: 6543 - DNA, 20 bp, Homo Sapiens
cattggctgctgcatagaga

SEQ ID NO: 6544 - DNA, 20 bp, Homo Sapiens
attggctgctgcatagagaa

SEQ ID NO: 6545 - DNA, 20 bp, Homo Sapiens
ttggctgctgcatagagaac

SEQ ID NO: 6546 - DNA, 20 bp, Homo Sapiens
tggctgctgcatagagaacg

SEQ ID NO: 6547 - DNA, 20 bp, Homo Sapiens
ggctgctgcatagagaacgt

SEQ ID NO: 6548 - DNA, 20 bp, Homo Sapiens
gctgctgcatagagaacgtg

SEQ ID NO: 6549 - DNA, 20 bp, Homo Sapiens
ctgctgcatagagaacgtgc

SEQ ID NO: 6550 - DNA, 20 bp, Homo Sapiens
tgctgcatagagaacgtgct

SEQ ID NO: 6551 - DNA, 20 bp, Homo Sapiens
gctgcatagagaacgtgctt

SEQ ID NO: 6552 - DNA, 20 bp, Homo Sapiens
ctgcatagagaacgtgcttc

SEQ ID NO: 6553 - DNA, 20 bp, Homo Sapiens
tgcatagagaacgtgcttct

SEQ ID NO: 6554 - DNA, 20 bp, Homo Sapiens
gcatagagaacgtgcttctg

SEQ ID NO: 6555 - DNA, 20 bp, Homo Sapiens
catagagaacgtgcttctgc

SEQ ID NO: 6556 - DNA, 20 bp, Homo Sapiens
atagagaacgtgcttctgca

SEQ ID NO: 6557 - DNA, 20 bp, Homo Sapiens
tagagaacgtgcttctgcag

SEQ ID NO: 6558 - DNA, 20 bp, Homo Sapiens
agagaacgtgcttctgcagc

SEQ ID NO: 6559 - DNA, 20 bp, Homo Sapiens
gagaacgtgcttctgcagca

SEQ ID NO: 6560 - DNA, 20 bp, Homo Sapiens
agaacgtgcttctgcagcag

SEQ ID NO: 6561 - DNA, 20 bp, Homo Sapiens
gaacgtgcttctgcagcaga

SEQ ID NO: 6562 - DNA, 20 bp, Homo Sapiens
aacgtgcttctgcagcagaa

SEQ ID NO: 6563 - DNA, 20 bp, Homo Sapiens
acgtgcttctgcagcagaac

SEQ ID NO: 6564 - DNA, 20 bp, Homo Sapiens
cgtgcttctgcagcagaacc

SEQ ID NO: 6565 - DNA, 20 bp, Homo Sapiens
gtgcttctgcagcagaacct

SEQ ID NO: 6566 - DNA, 20 bp, Homo Sapiens
tgcttctgcagcagaacctg

SEQ ID NO: 6567 - DNA, 20 bp, Homo Sapiens
gcttctgcagcagaacctga

SEQ ID NO: 6568 - DNA, 20 bp, Homo Sapiens
cttctgcagcagaacctgac

SEQ ID NO: 6569 - DNA, 20 bp, Homo Sapiens
ttctgcagcagaacctgact

SEQ ID NO: 6570 - DNA, 20 bp, Homo Sapiens
tctgcagcagaacctgactg

SEQ ID NO: 6571 - DNA, 20 bp, Homo Sapiens
ctgcagcagaacctgactgt

SEQ ID NO: 6572 - DNA, 20 bp, Homo Sapiens
tgcagcagaacctgactgtc

SEQ ID NO: 6573 - DNA, 20 bp, Homo Sapiens
gcagcagaacctgactgtcg

SEQ ID NO: 6574 - DNA, 20 bp, Homo Sapiens
cagcagaacctgactgtcgg

SEQ ID NO: 6575 - DNA, 20 bp, Homo Sapiens
agcagaacctgactgtcggc

SEQ ID NO: 6576 - DNA, 20 bp, Homo Sapiens
gcagaacctgactgtcggca

SEQ ID NO: 6577 - DNA, 20 bp, Homo Sapiens
cagaacctgactgtcggcag

SEQ ID NO: 6578 - DNA, 20 bp, Homo Sapiens
agaacctgactgtcggcagc

SEQ ID NO: 6579 - DNA, 20 bp, Homo Sapiens
gaacctgactgtcggcagcc

SEQ ID NO: 6580 - DNA, 20 bp, Homo Sapiens
aacctgactgtcggcagcca

SEQ ID NO: 6581 - DNA, 20 bp, Homo Sapiens
acctgactgtcggcagccag

SEQ ID NO: 6582 - DNA, 20 bp, Homo Sapiens
cctgactgtcggcagccaga

SEQ ID NO: 6583 - DNA, 20 bp, Homo Sapiens
ctgactgtcggcagccagac

SEQ ID NO: 6584 - DNA, 20 bp, Homo Sapiens
tgactgtcggcagccagaca

SEQ ID NO: 6585 - DNA, 20 bp, Homo Sapiens
gactgtcggcagccagacag

SEQ ID NO: 6586 - DNA, 20 bp, Homo Sapiens
actgtcggcagccagacagg

SEQ ID NO: 6587 - DNA, 20 bp, Homo Sapiens
ctgtcggcagccagacagga

SEQ ID NO: 6588 - DNA, 20 bp, Homo Sapiens
tgtcggcagccagacaggaa

SEQ ID NO: 6589 - DNA, 20 bp, Homo Sapiens
gtcggcagccagacaggaaa

SEQ ID NO: 6590 - DNA, 20 bp, Homo Sapiens
tcggcagccagacaggaaat

SEQ ID NO: 6591 - DNA, 20 bp, Homo Sapiens
cggcagccagacaggaaatg

SEQ ID NO: 6592 - DNA, 20 bp, Homo Sapiens
ggcagccagacaggaaatga

SEQ ID NO: 6593 - DNA, 20 bp, Homo Sapiens
gcagccagacaggaaatgac

SEQ ID NO: 6594 - DNA, 20 bp, Homo Sapiens
cagccagacaggaaatgaca

SEQ ID NO: 6595 - DNA, 20 bp, Homo Sapiens
agccagacaggaaatgacat

SEQ ID NO: 6596 - DNA, 20 bp, Homo Sapiens
gccagacaggaaatgacatc

SEQ ID NO: 6597 - DNA, 20 bp, Homo Sapiens
ccagacaggaaatgacatcg

SEQ ID NO: 6598 - DNA, 20 bp, Homo Sapiens
cagacaggaaatgacatcgg

SEQ ID NO: 6599 - DNA, 20 bp, Homo Sapiens
agacaggaaatgacatcgga

SEQ ID NO: 6600 - DNA, 20 bp, Homo Sapiens
gacaggaaatgacatcggag

SEQ ID NO: 6601 - DNA, 20 bp, Homo Sapiens
acaggaaatgacatcggaga

SEQ ID NO: 6602 - DNA, 20 bp, Homo Sapiens
caggaaatgacatcggagag

SEQ ID NO: 6603 - DNA, 20 bp, Homo Sapiens
aggaaatgacatcggagaga

SEQ ID NO: 6604 - DNA, 20 bp, Homo Sapiens
ggaaatgacatcggagagag

SEQ ID NO: 6605 - DNA, 20 bp, Homo Sapiens
gaaatgacatcggagagaga

SEQ ID NO: 6606 - DNA, 20 bp, Homo Sapiens
aaatgacatcggagagagag

SEQ ID NO: 6607 - DNA, 20 bp, Homo Sapiens
aatgacatcggagagagaga

SEQ ID NO: 6608 - DNA, 20 bp, Homo Sapiens
atgacatcggagagagagac

SEQ ID NO: 6609 - DNA, 20 bp, Homo Sapiens
tgacatcggagagagagaca

SEQ ID NO: 6610 - DNA, 20 bp, Homo Sapiens
gacatcggagagagagacaa

SEQ ID NO: 6611 - DNA, 20 bp, Homo Sapiens
acatcggagagagagacaag

SEQ ID NO: 6612 - DNA, 20 bp, Homo Sapiens
catcggagagagagacaaga

SEQ ID NO: 6613 - DNA, 20 bp, Homo Sapiens
atcggagagagagacaagat

SEQ ID NO: 6614 - DNA, 20 bp, Homo Sapiens
tcggagagagagacaagatc

SEQ ID NO: 6615 - DNA, 20 bp, Homo Sapiens
cggagagagagacaagatca

SEQ ID NO: 6616 - DNA, 20 bp, Homo Sapiens
ggagagagagacaagatcac

SEQ ID NO: 6617 - DNA, 20 bp, Homo Sapiens
gagagagagacaagatcaca

SEQ ID NO: 6618 - DNA, 20 bp, Homo Sapiens
agagagagacaagatcacag

SEQ ID NO: 6619 - DNA, 20 bp, Homo Sapiens
gagagagacaagatcacaga

SEQ ID NO: 6620 - DNA, 20 bp, Homo Sapiens
agagagacaagatcacagag

SEQ ID NO: 6621 - DNA, 20 bp, Homo Sapiens
gagagacaagatcacagaga

SEQ ID NO: 6622 - DNA, 20 bp, Homo Sapiens
agagacaagatcacagagaa

SEQ ID NO: 6623 - DNA, 20 bp, Homo Sapiens
gagacaagatcacagagaat

SEQ ID NO: 6624 - DNA, 20 bp, Homo Sapiens
agacaagatcacagagaatc

SEQ ID NO: 6625 - DNA, 20 bp, Homo Sapiens
gacaagatcacagagaatcc

SEQ ID NO: 6626 - DNA, 20 bp, Homo Sapiens
acaagatcacagagaatcca

SEQ ID NO: 6627 - DNA, 20 bp, Homo Sapiens
caagatcacagagaatccag

SEQ ID NO: 6628 - DNA, 20 bp, Homo Sapiens
aagatcacagagaatccagt

SEQ ID NO: 6629 - DNA, 20 bp, Homo Sapiens
agatcacagagaatccagtc

SEQ ID NO: 6630 - DNA, 20 bp, Homo Sapiens
gatcacagagaatccagtca

SEQ ID NO: 6631 - DNA, 20 bp, Homo Sapiens
atcacagagaatccagtcag

SEQ ID NO: 6632 - DNA, 20 bp, Homo Sapiens
tcacagagaatccagtcagt

SEQ ID NO: 6633 - DNA, 20 bp, Homo Sapiens
cacagagaatccagtcagta

SEQ ID NO: 6634 - DNA, 20 bp, Homo Sapiens
acagagaatccagtcagtac

SEQ ID NO: 6635 - DNA, 20 bp, Homo Sapiens
cagagaatccagtcagtacc

SEQ ID NO: 6636 - DNA, 20 bp, Homo Sapiens
agagaatccagtcagtaccg

SEQ ID NO: 6637 - DNA, 20 bp, Homo Sapiens
gagaatccagtcagtaccgg

SEQ ID NO: 6638 - DNA, 20 bp, Homo Sapiens
agaatccagtcagtaccggc

SEQ ID NO: 6639 - DNA, 20 bp, Homo Sapiens
gaatccagtcagtaccggcg

SEQ ID NO: 6640 - DNA, 20 bp, Homo Sapiens
aatccagtcagtaccggcga

SEQ ID NO: 6641 - DNA, 20 bp, Homo Sapiens
atccagtcagtaccggcgag

SEQ ID NO: 6642 - DNA, 20 bp, Homo Sapiens
tccagtcagtaccggcgaga

SEQ ID NO: 6643 - DNA, 20 bp, Homo Sapiens
ccagtcagtaccggcgagaa

SEQ ID NO: 6644 - DNA, 20 bp, Homo Sapiens
cagtcagtaccggcgagaaa

SEQ ID NO: 6645 - DNA, 20 bp, Homo Sapiens
agtcagtaccggcgagaaaa

SEQ ID NO: 6646 - DNA, 20 bp, Homo Sapiens
gtcagtaccggcgagaaaaa

SEQ ID NO: 6647 - DNA, 20 bp, Homo Sapiens
tcagtaccggcgagaaaaac

SEQ ID NO: 6648 - DNA, 20 bp, Homo Sapiens
cagtaccggcgagaaaaacg

SEQ ID NO: 6649 - DNA, 20 bp, Homo Sapiens
agtaccggcgagaaaaacgc

SEQ ID NO: 6650 - DNA, 20 bp, Homo Sapiens
gtaccggcgagaaaaacgcg

SEQ ID NO: 6651 - DNA, 20 bp, Homo Sapiens
taccggcgagaaaaacgcgg

SEQ ID NO: 6652 - DNA, 20 bp, Homo Sapiens
accggcgagaaaaacgcggc

SEQ ID NO: 6653 - DNA, 20 bp, Homo Sapiens
ccggcgagaaaaacgcggcc

SEQ ID NO: 6654 - DNA, 20 bp, Homo Sapiens
cggcgagaaaaacgcggcca

SEQ ID NO: 6655 - DNA, 20 bp, Homo Sapiens
ggcgagaaaaacgcggccac

SEQ ID NO: 6656 - DNA, 20 bp, Homo Sapiens
gcgagaaaaacgcggccacg

SEQ ID NO: 6657 - DNA, 20 bp, Homo Sapiens
cgagaaaaacgcggccacgt

SEQ ID NO: 6658 - DNA, 20 bp, Homo Sapiens
gagaaaaacgcggccacgtg

SEQ ID NO: 6659 - DNA, 20 bp, Homo Sapiens
agaaaaacgcggccacgtgg

SEQ ID NO: 6660 - DNA, 20 bp, Homo Sapiens
gaaaaacgcggccacgtgga

SEQ ID NO: 6661 - DNA, 20 bp, Homo Sapiens
aaaaacgcggccacgtggag

SEQ ID NO: 6662 - DNA, 20 bp, Homo Sapiens
aaaacgcggccacgtggagc

SEQ ID NO: 6663 - DNA, 20 bp, Homo Sapiens
aaacgcggccacgtggagca

SEQ ID NO: 6664 - DNA, 20 bp, Homo Sapiens
aacgcggccacgtggagcat

SEQ ID NO: 6665 - DNA, 20 bp, Homo Sapiens
acgcggccacgtggagcatc

SEQ ID NO: 6666 - DNA, 20 bp, Homo Sapiens
cgcggccacgtggagcatcc

SEQ ID NO: 6667 - DNA, 20 bp, Homo Sapiens
gcggccacgtggagcatcct

SEQ ID NO: 6668 - DNA, 20 bp, Homo Sapiens
cggccacgtggagcatcctg

SEQ ID NO: 6669 - DNA, 20 bp, Homo Sapiens
ggccacgtggagcatcctgg

SEQ ID NO: 6670 - DNA, 20 bp, Homo Sapiens
gccacgtggagcatcctggc

SEQ ID NO: 6671 - DNA, 20 bp, Homo Sapiens
ccacgtggagcatcctggct

SEQ ID NO: 6672 - DNA, 20 bp, Homo Sapiens
cacgtggagcatcctggctg

SEQ ID NO: 6673 - DNA, 20 bp, Homo Sapiens
acgtggagcatcctggctgt

SEQ ID NO: 6674 - DNA, 20 bp, Homo Sapiens
cgtggagcatcctggctgtc

SEQ ID NO: 6675 - DNA, 20 bp, Homo Sapiens
gtggagcatcctggctgtcc

SEQ ID NO: 6676 - DNA, 20 bp, Homo Sapiens
tggagcatcctggctgtcct

SEQ ID NO: 6677 - DNA, 20 bp, Homo Sapiens
ggagcatcctggctgtcctg

SEQ ID NO: 6678 - DNA, 20 bp, Homo Sapiens
gagcatcctggctgtcctgt

SEQ ID NO: 6679 - DNA, 20 bp, Homo Sapiens
agcatcctggctgtcctgtg

SEQ ID NO: 6680 - DNA, 20 bp, Homo Sapiens
gcatcctggctgtcctgtgc

SEQ ID NO: 6681 - DNA, 20 bp, Homo Sapiens
catcctggctgtcctgtgcc

SEQ ID NO: 6682 - DNA, 20 bp, Homo Sapiens
atcctggctgtcctgtgcct

SEQ ID NO: 6683 - DNA, 20 bp, Homo Sapiens
tcctggctgtcctgtgcctg

SEQ ID NO: 6684 - DNA, 20 bp, Homo Sapiens
cctggctgtcctgtgcctgc

SEQ ID NO: 6685 - DNA, 20 bp, Homo Sapiens
ctggctgtcctgtgcctgct

SEQ ID NO: 6686 - DNA, 20 bp, Homo Sapiens
tggctgtcctgtgcctgctt

SEQ ID NO: 6687 - DNA, 20 bp, Homo Sapiens
ggctgtcctgtgcctgcttg

SEQ ID NO: 6688 - DNA, 20 bp, Homo Sapiens
gctgtcctgtgcctgcttgt

SEQ ID NO: 6689 - DNA, 20 bp, Homo Sapiens
ctgtcctgtgcctgcttgtg

SEQ ID NO: 6690 - DNA, 20 bp, Homo Sapiens
tgtcctgtgcctgcttgtgg

SEQ ID NO: 6691 - DNA, 20 bp, Homo Sapiens
gtcctgtgcctgcttgtggt

SEQ ID NO: 6692 - DNA, 20 bp, Homo Sapiens
tcctgtgcctgcttgtggtc

SEQ ID NO: 6693 - DNA, 20 bp, Homo Sapiens
cctgtgcctgcttgtggtcg

SEQ ID NO: 6694 - DNA, 20 bp, Homo Sapiens
ctgtgcctgcttgtggtcgt

SEQ ID NO: 6695 - DNA, 20 bp, Homo Sapiens
tgtgcctgcttgtggtcgtg

SEQ ID NO: 6696 - DNA, 20 bp, Homo Sapiens
gtgcctgcttgtggtcgtgg

SEQ ID NO: 6697 - DNA, 20 bp, Homo Sapiens
tgcctgcttgtggtcgtggc

SEQ ID NO: 6698 - DNA, 20 bp, Homo Sapiens
gcctgcttgtggtcgtggcg

SEQ ID NO: 6699 - DNA, 20 bp, Homo Sapiens
cctgcttgtggtcgtggcgg

SEQ ID NO: 6700 - DNA, 20 bp, Homo Sapiens
ctgcttgtggtcgtggcggt

SEQ ID NO: 6701 - DNA, 20 bp, Homo Sapiens
tgcttgtggtcgtggcggtg

SEQ ID NO: 6702 - DNA, 20 bp, Homo Sapiens
gcttgtggtcgtggcggtgg

SEQ ID NO: 6703 - DNA, 20 bp, Homo Sapiens
cttgtggtcgtggcggtggc

SEQ ID NO: 6704 - DNA, 20 bp, Homo Sapiens
ttgtggtcgtggcggtggcc

SEQ ID NO: 6705 - DNA, 20 bp, Homo Sapiens
tgtggtcgtggcggtggcca

SEQ ID NO: 6706 - DNA, 20 bp, Homo Sapiens
gtggtcgtggcggtggccat

SEQ ID NO: 6707 - DNA, 20 bp, Homo Sapiens
tggtcgtggcggtggccata

SEQ ID NO: 6708 - DNA, 20 bp, Homo Sapiens
ggtcgtggcggtggccatag

SEQ ID NO: 6709 - DNA, 20 bp, Homo Sapiens
gtcgtggcggtggccatagg

SEQ ID NO: 6710 - DNA, 20 bp, Homo Sapiens
tcgtggcggtggccataggc

SEQ ID NO: 6711 - DNA, 20 bp, Homo Sapiens
cgtggcggtggccataggct

SEQ ID NO: 6712 - DNA, 20 bp, Homo Sapiens
gtggcggtggccataggctg

SEQ ID NO: 6713 - DNA, 20 bp, Homo Sapiens
tggcggtggccataggctgg

SEQ ID NO: 6714 - DNA, 20 bp, Homo Sapiens
ggcggtggccataggctggg

SEQ ID NO: 6715 - DNA, 20 bp, Homo Sapiens
gcggtggccataggctgggt

SEQ ID NO: 6716 - DNA, 20 bp, Homo Sapiens
cggtggccataggctgggtg

SEQ ID NO: 6717 - DNA, 20 bp, Homo Sapiens
ggtggccataggctgggtgt

SEQ ID NO: 6718 - DNA, 20 bp, Homo Sapiens
gtggccataggctgggtgtg

SEQ ID NO: 6719 - DNA, 20 bp, Homo Sapiens
tggccataggctgggtgtgc

SEQ ID NO: 6720 - DNA, 20 bp, Homo Sapiens
ggccataggctgggtgtgca

SEQ ID NO: 6721 - DNA, 20 bp, Homo Sapiens
gccataggctgggtgtgcag

SEQ ID NO: 6722 - DNA, 20 bp, Homo Sapiens
ccataggctgggtgtgcagg

SEQ ID NO: 6723 - DNA, 20 bp, Homo Sapiens
cataggctgggtgtgcaggg

SEQ ID NO: 6724 - DNA, 20 bp, Homo Sapiens
ataggctgggtgtgcaggga

SEQ ID NO: 6725 - DNA, 20 bp, Homo Sapiens
taggctgggtgtgcagggac

SEQ ID NO: 6726 - DNA, 20 bp, Homo Sapiens
aggctgggtgtgcagggacc

SEQ ID NO: 6727 - DNA, 20 bp, Homo Sapiens
ggctgggtgtgcagggaccg

SEQ ID NO: 6728 - DNA, 20 bp, Homo Sapiens
gctgggtgtgcagggaccga

SEQ ID NO: 6729 - DNA, 20 bp, Homo Sapiens
ctgggtgtgcagggaccgat

SEQ ID NO: 6730 - DNA, 20 bp, Homo Sapiens
tgggtgtgcagggaccgatg

SEQ ID NO: 6731 - DNA, 20 bp, Homo Sapiens
gggtgtgcagggaccgatgc

SEQ ID NO: 6732 - DNA, 20 bp, Homo Sapiens
ggtgtgcagggaccgatgcc

SEQ ID NO: 6733 - DNA, 20 bp, Homo Sapiens
gtgtgcagggaccgatgcct

SEQ ID NO: 6734 - DNA, 20 bp, Homo Sapiens
tgtgcagggaccgatgcctc

SEQ ID NO: 6735 - DNA, 20 bp, Homo Sapiens
gtgcagggaccgatgcctcc

SEQ ID NO: 6736 - DNA, 20 bp, Homo Sapiens
tgcagggaccgatgcctcca

SEQ ID NO: 6737 - DNA, 20 bp, Homo Sapiens
gcagggaccgatgcctccaa

SEQ ID NO: 6738 - DNA, 20 bp, Homo Sapiens
cagggaccgatgcctccaac

SEQ ID NO: 6739 - DNA, 20 bp, Homo Sapiens
agggaccgatgcctccaaca

SEQ ID NO: 6740 - DNA, 20 bp, Homo Sapiens
gggaccgatgcctccaacac

SEQ ID NO: 6741 - DNA, 20 bp, Homo Sapiens
ggaccgatgcctccaacaca

SEQ ID NO: 6742 - DNA, 20 bp, Homo Sapiens
gaccgatgcctccaacacag

SEQ ID NO: 6743 - DNA, 20 bp, Homo Sapiens
accgatgcctccaacacagc

SEQ ID NO: 6744 - DNA, 20 bp, Homo Sapiens
ccgatgcctccaacacagct

SEQ ID NO: 6745 - DNA, 20 bp, Homo Sapiens
cgatgcctccaacacagcta

SEQ ID NO: 6746 - DNA, 20 bp, Homo Sapiens
gatgcctccaacacagctat

SEQ ID NO: 6747 - DNA, 20 bp, Homo Sapiens
atgcctccaacacagctatg

SEQ ID NO: 6748 - DNA, 20 bp, Homo Sapiens
tgcctccaacacagctatgc

SEQ ID NO: 6749 - DNA, 20 bp, Homo Sapiens
gcctccaacacagctatgca

SEQ ID NO: 6750 - DNA, 20 bp, Homo Sapiens
cctccaacacagctatgcag

SEQ ID NO: 6751 - DNA, 20 bp, Homo Sapiens
ctccaacacagctatgcagg

SEQ ID NO: 6752 - DNA, 20 bp, Homo Sapiens
tccaacacagctatgcaggt

SEQ ID NO: 6753 - DNA, 20 bp, Homo Sapiens
ccaacacagctatgcaggtg

SEQ ID NO: 6754 - DNA, 20 bp, Homo Sapiens
caacacagctatgcaggtgc

SEQ ID NO: 6755 - DNA, 20 bp, Homo Sapiens
aacacagctatgcaggtgcc

SEQ ID NO: 6756 - DNA, 20 bp, Homo Sapiens
acacagctatgcaggtgcct

SEQ ID NO: 6757 - DNA, 20 bp, Homo Sapiens
cacagctatgcaggtgcctg

SEQ ID NO: 6758 - DNA, 20 bp, Homo Sapiens
acagctatgcaggtgcctgg

SEQ ID NO: 6759 - DNA, 20 bp, Homo Sapiens
cagctatgcaggtgcctggg

SEQ ID NO: 6760 - DNA, 20 bp, Homo Sapiens
agctatgcaggtgcctgggc

SEQ ID NO: 6761 - DNA, 20 bp, Homo Sapiens
gctatgcaggtgcctgggct

SEQ ID NO: 6762 - DNA, 20 bp, Homo Sapiens
ctatgcaggtgcctgggctg

SEQ ID NO: 6763 - DNA, 20 bp, Homo Sapiens
tatgcaggtgcctgggctgt

SEQ ID NO: 6764 - DNA, 20 bp, Homo Sapiens
atgcaggtgcctgggctgtg

SEQ ID NO: 6765 - DNA, 20 bp, Homo Sapiens
tgcaggtgcctgggctgtga

SEQ ID NO: 6766 - DNA, 20 bp, Homo Sapiens
gcaggtgcctgggctgtgag

SEQ ID NO: 6767 - DNA, 20 bp, Homo Sapiens
caggtgcctgggctgtgagt

SEQ ID NO: 6768 - DNA, 20 bp, Homo Sapiens
aggtgcctgggctgtgagtc

SEQ ID NO: 6769 - DNA, 20 bp, Homo Sapiens
ggtgcctgggctgtgagtcc

SEQ ID NO: 6770 - DNA, 20 bp, Homo Sapiens
gtgcctgggctgtgagtccg

SEQ ID NO: 6771 - DNA, 20 bp, Homo Sapiens
tgcctgggctgtgagtccgg

SEQ ID NO: 6772 - DNA, 20 bp, Homo Sapiens
gcctgggctgtgagtccgga

SEQ ID NO: 6773 - DNA, 20 bp, Homo Sapiens
cctgggctgtgagtccggag

SEQ ID NO: 6774 - DNA, 20 bp, Homo Sapiens
ctgggctgtgagtccggaga

SEQ ID NO: 6775 - DNA, 20 bp, Homo Sapiens
tgggctgtgagtccggagac

SEQ ID NO: 6776 - DNA, 20 bp, Homo Sapiens
gggctgtgagtccggagaca

SEQ ID NO: 6777 - DNA, 20 bp, Homo Sapiens
ggctgtgagtccggagacag

SEQ ID NO: 6778 - DNA, 20 bp, Homo Sapiens
gctgtgagtccggagacaga

SEQ ID NO: 6779 - DNA, 20 bp, Homo Sapiens
ctgtgagtccggagacagag

SEQ ID NO: 6780 - DNA, 20 bp, Homo Sapiens
tgtgagtccggagacagagc

SEQ ID NO: 6781 - DNA, 20 bp, Homo Sapiens
gtgagtccggagacagagct

SEQ ID NO: 6782 - DNA, 20 bp, Homo Sapiens
tgagtccggagacagagctc

SEQ ID NO: 6783 - DNA, 20 bp, Homo Sapiens
gagtccggagacagagctca

SEQ ID NO: 6784 - DNA, 20 bp, Homo Sapiens
agtccggagacagagctcac

SEQ ID NO: 6785 - DNA, 20 bp, Homo Sapiens
gtccggagacagagctcact

SEQ ID NO: 6786 - DNA, 20 bp, Homo Sapiens
tccggagacagagctcactg

SEQ ID NO: 6787 - DNA, 20 bp, Homo Sapiens
ccggagacagagctcactgg

SEQ ID NO: 6788 - DNA, 20 bp, Homo Sapiens
cggagacagagctcactggt

SEQ ID NO: 6789 - DNA, 20 bp, Homo Sapiens
ggagacagagctcactggtg

SEQ ID NO: 6790 - DNA, 20 bp, Homo Sapiens
gagacagagctcactggtga

SEQ ID NO: 6791 - DNA, 20 bp, Homo Sapiens
agacagagctcactggtgag

SEQ ID NO: 6792 - DNA, 20 bp, Homo Sapiens
gacagagctcactggtgagt

SEQ ID NO: 6793 - DNA, 20 bp, Homo Sapiens
acagagctcactggtgagtt

SEQ ID NO: 6794 - DNA, 20 bp, Homo Sapiens
cagagctcactggtgagttt

SEQ ID NO: 6795 - DNA, 20 bp, Homo Sapiens
agagctcactggtgagtttg

SEQ ID NO: 6796 - DNA, 20 bp, Homo Sapiens
gagctcactggtgagtttgc

SEQ ID NO: 6797 - DNA, 20 bp, Homo Sapiens
agctcactggtgagtttgcc

SEQ ID NO: 6798 - DNA, 20 bp, Homo Sapiens
gctcactggtgagtttgccg

SEQ ID NO: 6799 - DNA, 20 bp, Homo Sapiens
ctcactggtgagtttgccgt

SEQ ID NO: 6800 - DNA, 20 bp, Homo Sapiens
tcactggtgagtttgccgtg

SEQ ID NO: 6801 - DNA, 20 bp, Homo Sapiens
cactggtgagtttgccgtgg

SEQ ID NO: 6802 - DNA, 20 bp, Homo Sapiens
actggtgagtttgccgtggg

SEQ ID NO: 6803 - DNA, 20 bp, Homo Sapiens
ctggtgagtttgccgtggga

SEQ ID NO: 6804 - DNA, 20 bp, Homo Sapiens
tggtgagtttgccgtgggaa

SEQ ID NO: 6805 - DNA, 20 bp, Homo Sapiens
ggtgagtttgccgtgggaag

SEQ ID NO: 6806 - DNA, 20 bp, Homo Sapiens
gtgagtttgccgtgggaagc

SEQ ID NO: 6807 - DNA, 20 bp, Homo Sapiens
tgagtttgccgtgggaagca

SEQ ID NO: 6808 - DNA, 20 bp, Homo Sapiens
gagtttgccgtgggaagcag

SEQ ID NO: 6809 - DNA, 20 bp, Homo Sapiens
agtttgccgtgggaagcagc

SEQ ID NO: 6810 - DNA, 20 bp, Homo Sapiens
gtttgccgtgggaagcagca

SEQ ID NO: 6811 - DNA, 20 bp, Homo Sapiens
tttgccgtgggaagcagcag

SEQ ID NO: 6812 - DNA, 20 bp, Homo Sapiens
ttgccgtgggaagcagcagg

SEQ ID NO: 6813 - DNA, 20 bp, Homo Sapiens
tgccgtgggaagcagcaggt

SEQ ID NO: 6814 - DNA, 20 bp, Homo Sapiens
gccgtgggaagcagcaggtt

SEQ ID NO: 6815 - DNA, 20 bp, Homo Sapiens
ccgtgggaagcagcaggttc

SEQ ID NO: 6816 - DNA, 20 bp, Homo Sapiens
cgtgggaagcagcaggttct

SEQ ID NO: 6817 - DNA, 20 bp, Homo Sapiens
gtgggaagcagcaggttctg

SEQ ID NO: 6818 - DNA, 20 bp, Homo Sapiens
tgggaagcagcaggttctgg

SEQ ID NO: 6819 - DNA, 20 bp, Homo Sapiens
gggaagcagcaggttctggg

SEQ ID NO: 6820 - DNA, 20 bp, Homo Sapiens
ggaagcagcaggttctgggg

SEQ ID NO: 6821 - DNA, 20 bp, Homo Sapiens
gaagcagcaggttctggggg

SEQ ID NO: 6822 - DNA, 20 bp, Homo Sapiens
aagcagcaggttctgggggg

SEQ ID NO: 6823 - DNA, 20 bp, Homo Sapiens
agcagcaggttctggggggc

SEQ ID NO: 6824 - DNA, 20 bp, Homo Sapiens
gcagcaggttctggggggcc

SEQ ID NO: 6825 - DNA, 20 bp, Homo Sapiens
cagcaggttctggggggccc

SEQ ID NO: 6826 - DNA, 20 bp, Homo Sapiens
agcaggttctggggggccca

SEQ ID NO: 6827 - DNA, 20 bp, Homo Sapiens
gcaggttctggggggcccag

SEQ ID NO: 6828 - DNA, 20 bp, Homo Sapiens
caggttctggggggcccagg

SEQ ID NO: 6829 - DNA, 20 bp, Homo Sapiens
aggttctggggggcccaggg

SEQ ID NO: 6830 - DNA, 20 bp, Homo Sapiens
ggttctggggggcccagggg

SEQ ID NO: 6831 - DNA, 20 bp, Homo Sapiens
gttctggggggcccagggga

SEQ ID NO: 6832 - DNA, 20 bp, Homo Sapiens
ttctggggggcccaggggag

SEQ ID NO: 6833 - DNA, 20 bp, Homo Sapiens
tctggggggcccaggggagg

SEQ ID NO: 6834 - DNA, 20 bp, Homo Sapiens
ctggggggcccaggggaggc

SEQ ID NO: 6835 - DNA, 20 bp, Homo Sapiens
tggggggcccaggggaggct

SEQ ID NO: 6836 - DNA, 20 bp, Homo Sapiens
ggggggcccaggggaggctt

SEQ ID NO: 6837 - DNA, 20 bp, Homo Sapiens
gggggcccaggggaggcttg

SEQ ID NO: 6838 - DNA, 20 bp, Homo Sapiens
ggggcccaggggaggcttgg

SEQ ID NO: 6839 - DNA, 20 bp, Homo Sapiens
gggcccaggggaggcttggc

SEQ ID NO: 6840 - DNA, 20 bp, Homo Sapiens
ggcccaggggaggcttggct

SEQ ID NO: 6841 - DNA, 20 bp, Homo Sapiens
gcccaggggaggcttggctg

SEQ ID NO: 6842 - DNA, 20 bp, Homo Sapiens
cccaggggaggcttggctgc

SEQ ID NO: 6843 - DNA, 20 bp, Homo Sapiens
ccaggggaggcttggctgcc

SEQ ID NO: 6844 - DNA, 20 bp, Homo Sapiens
caggggaggcttggctgcca

SEQ ID NO: 6845 - DNA, 20 bp, Homo Sapiens
aggggaggcttggctgccag

SEQ ID NO: 6846 - DNA, 20 bp, Homo Sapiens
ggggaggcttggctgccagc

SEQ ID NO: 6847 - DNA, 20 bp, Homo Sapiens
gggaggcttggctgccagct

SEQ ID NO: 6848 - DNA, 20 bp, Homo Sapiens
ggaggcttggctgccagctg

SEQ ID NO: 6849 - DNA, 20 bp, Homo Sapiens
gaggcttggctgccagctgt

SEQ ID NO: 6850 - DNA, 20 bp, Homo Sapiens
aggcttggctgccagctgtc

SEQ ID NO: 6851 - DNA, 20 bp, Homo Sapiens
ggcttggctgccagctgtct

SEQ ID NO: 6852 - DNA, 20 bp, Homo Sapiens
gcttggctgccagctgtctt

SEQ ID NO: 6853 - DNA, 20 bp, Homo Sapiens
cttggctgccagctgtcttt

SEQ ID NO: 6854 - DNA, 20 bp, Homo Sapiens
ttggctgccagctgtctttc

SEQ ID NO: 6855 - DNA, 20 bp, Homo Sapiens
tggctgccagctgtctttca

SEQ ID NO: 6856 - DNA, 20 bp, Homo Sapiens
ggctgccagctgtctttcag

SEQ ID NO: 6857 - DNA, 20 bp, Homo Sapiens
gctgccagctgtctttcaga

SEQ ID NO: 6858 - DNA, 20 bp, Homo Sapiens
ctgccagctgtctttcagag

SEQ ID NO: 6859 - DNA, 20 bp, Homo Sapiens
tgccagctgtctttcagagt

SEQ ID NO: 6860 - DNA, 20 bp, Homo Sapiens
gccagctgtctttcagagtt

SEQ ID NO: 6861 - DNA, 20 bp, Homo Sapiens
ccagctgtctttcagagttt

SEQ ID NO: 6862 - DNA, 20 bp, Homo Sapiens
cagctgtctttcagagtttc

SEQ ID NO: 6863 - DNA, 20 bp, Homo Sapiens
agctgtctttcagagtttca

SEQ ID NO: 6864 - DNA, 20 bp, Homo Sapiens
gctgtctttcagagtttcaa

SEQ ID NO: 6865 - DNA, 20 bp, Homo Sapiens
ctgtctttcagagtttcaaa

SEQ ID NO: 6866 - DNA, 20 bp, Homo Sapiens
tgtctttcagagtttcaaaa

SEQ ID NO: 6867 - DNA, 20 bp, Homo Sapiens
gtctttcagagtttcaaaaa

SEQ ID NO: 6868 - DNA, 20 bp, Homo Sapiens
tctttcagagtttcaaaaaa

SEQ ID NO: 6869 - DNA, 20 bp, Homo Sapiens
ctttcagagtttcaaaaaac

SEQ ID NO: 6870 - DNA, 20 bp, Homo Sapiens
tttcagagtttcaaaaaact

SEQ ID NO: 6871 - DNA, 20 bp, Homo Sapiens
ttcagagtttcaaaaaactt

SEQ ID NO: 6872 - DNA, 20 bp, Homo Sapiens
tcagagtttcaaaaaacttt

SEQ ID NO: 6873 - DNA, 20 bp, Homo Sapiens
cagagtttcaaaaaactttc

SEQ ID NO: 6874 - DNA, 20 bp, Homo Sapiens
agagtttcaaaaaactttca

SEQ ID NO: 6875 - DNA, 20 bp, Homo Sapiens
gagtttcaaaaaactttcaa

SEQ ID NO: 6876 - DNA, 20 bp, Homo Sapiens
agtttcaaaaaactttcaaa

SEQ ID NO: 6877 - DNA, 20 bp, Homo Sapiens
gtttcaaaaaactttcaaaa

SEQ ID NO: 6878 - DNA, 20 bp, Homo Sapiens
tttcaaaaaactttcaaaag

SEQ ID NO: 6879 - DNA, 20 bp, Homo Sapiens
ttcaaaaaactttcaaaagg

SEQ ID NO: 6880 - DNA, 20 bp, Homo Sapiens
tcaaaaaactttcaaaaggc

SEQ ID NO: 6881 - DNA, 20 bp, Homo Sapiens
caaaaaactttcaaaaggca

SEQ ID NO: 6882 - DNA, 20 bp, Homo Sapiens
aaaaaactttcaaaaggcaa

SEQ ID NO: 6883 - DNA, 20 bp, Homo Sapiens
aaaaactttcaaaaggcaaa

SEQ ID NO: 6884 - DNA, 20 bp, Homo Sapiens
aaaactttcaaaaggcaaaa

SEQ ID NO: 6885 - DNA, 20 bp, Homo Sapiens
aaactttcaaaaggcaaaag

SEQ ID NO: 6886 - DNA, 20 bp, Homo Sapiens
aactttcaaaaggcaaaagt

SEQ ID NO: 6887 - DNA, 20 bp, Homo Sapiens
actttcaaaaggcaaaagtc

SEQ ID NO: 6888 - DNA, 20 bp, Homo Sapiens
ctttcaaaaggcaaaagtcc

SEQ ID NO: 6889 - DNA, 20 bp, Homo Sapiens
tttcaaaaggcaaaagtccc

SEQ ID NO: 6890 - DNA, 20 bp, Homo Sapiens
ttcaaaaggcaaaagtccct

SEQ ID NO: 6891 - DNA, 20 bp, Homo Sapiens
tcaaaaggcaaaagtccctt

SEQ ID NO: 6892 - DNA, 20 bp, Homo Sapiens
caaaaggcaaaagtcccttg

SEQ ID NO: 6893 - DNA, 20 bp, Homo Sapiens
aaaaggcaaaagtcccttgc

SEQ ID NO: 6894 - DNA, 20 bp, Homo Sapiens
aaaggcaaaagtcccttgcc

SEQ ID NO: 6895 - DNA, 20 bp, Homo Sapiens
aaggcaaaagtcccttgcct

SEQ ID NO: 6896 - DNA, 20 bp, Homo Sapiens
aggcaaaagtcccttgcctt

SEQ ID NO: 6897 - DNA, 20 bp, Homo Sapiens
ggcaaaagtcccttgccttg

SEQ ID NO: 6898 - DNA, 20 bp, Homo Sapiens
gcaaaagtcccttgccttga

SEQ ID NO: 6899 - DNA, 20 bp, Homo Sapiens
caaaagtcccttgccttgaa

SEQ ID NO: 6900 - DNA, 20 bp, Homo Sapiens
aaaagtcccttgccttgaac

SEQ ID NO: 6901 - DNA, 20 bp, Homo Sapiens
aaagtcccttgccttgaaca

SEQ ID NO: 6902 - DNA, 20 bp, Homo Sapiens
aagtcccttgccttgaacaa

SEQ ID NO: 6903 - DNA, 20 bp, Homo Sapiens
agtcccttgccttgaacaac

SEQ ID NO: 6904 - DNA, 20 bp, Homo Sapiens
gtcccttgccttgaacaact

SEQ ID NO: 6905 - DNA, 20 bp, Homo Sapiens
tcccttgccttgaacaactg

SEQ ID NO: 6906 - DNA, 20 bp, Homo Sapiens
cccttgccttgaacaactgt

SEQ ID NO: 6907 - DNA, 20 bp, Homo Sapiens
ccttgccttgaacaactgtt

SEQ ID NO: 6908 - DNA, 20 bp, Homo Sapiens
cttgccttgaacaactgttg

SEQ ID NO: 6909 - DNA, 20 bp, Homo Sapiens
ttgccttgaacaactgttgt

SEQ ID NO: 6910 - DNA, 20 bp, Homo Sapiens
tgccttgaacaactgttgtt

SEQ ID NO: 6911 - DNA, 20 bp, Homo Sapiens
gccttgaacaactgttgttc

SEQ ID NO: 6912 - DNA, 20 bp, Homo Sapiens
ccttgaacaactgttgttcc

SEQ ID NO: 6913 - DNA, 20 bp, Homo Sapiens
cttgaacaactgttgttcct

SEQ ID NO: 6914 - DNA, 20 bp, Homo Sapiens
ttgaacaactgttgttcctg

SEQ ID NO: 6915 - DNA, 20 bp, Homo Sapiens
tgaacaactgttgttcctgg

SEQ ID NO: 6916 - DNA, 20 bp, Homo Sapiens
gaacaactgttgttcctgga

SEQ ID NO: 6917 - DNA, 20 bp, Homo Sapiens
aacaactgttgttcctggag

SEQ ID NO: 6918 - DNA, 20 bp, Homo Sapiens
acaactgttgttcctggaga

SEQ ID NO: 6919 - DNA, 20 bp, Homo Sapiens
caactgttgttcctggagac

SEQ ID NO: 6920 - DNA, 20 bp, Homo Sapiens
aactgttgttcctggagacg

SEQ ID NO: 6921 - DNA, 20 bp, Homo Sapiens
actgttgttcctggagacgc

SEQ ID NO: 6922 - DNA, 20 bp, Homo Sapiens
ctgttgttcctggagacgca

SEQ ID NO: 6923 - DNA, 20 bp, Homo Sapiens
tgttgttcctggagacgcag

SEQ ID NO: 6924 - DNA, 20 bp, Homo Sapiens
gttgttcctggagacgcagc

SEQ ID NO: 6925 - DNA, 20 bp, Homo Sapiens
ttgttcctggagacgcagcg

SEQ ID NO: 6926 - DNA, 20 bp, Homo Sapiens
tgttcctggagacgcagcga

SEQ ID NO: 6927 - DNA, 20 bp, Homo Sapiens
gttcctggagacgcagcgaa

SEQ ID NO: 6928 - DNA, 20 bp, Homo Sapiens
ttcctggagacgcagcgaag

SEQ ID NO: 6929 - DNA, 20 bp, Homo Sapiens
tcctggagacgcagcgaagc

SEQ ID NO: 6930 - DNA, 20 bp, Homo Sapiens
cctggagacgcagcgaagcc

SEQ ID NO: 6931 - DNA, 20 bp, Homo Sapiens
ctggagacgcagcgaagccc

SEQ ID NO: 6932 - DNA, 20 bp, Homo Sapiens
tggagacgcagcgaagccct

SEQ ID NO: 6933 - DNA, 20 bp, Homo Sapiens
ggagacgcagcgaagccctc

SEQ ID NO: 6934 - DNA, 20 bp, Homo Sapiens
gagacgcagcgaagccctcg

SEQ ID NO: 6935 - DNA, 20 bp, Homo Sapiens
agacgcagcgaagccctcga

SEQ ID NO: 6936 - DNA, 20 bp, Homo Sapiens
gacgcagcgaagccctcgat

SEQ ID NO: 6937 - DNA, 20 bp, Homo Sapiens
acgcagcgaagccctcgatg

SEQ ID NO: 6938 - DNA, 20 bp, Homo Sapiens
cgcagcgaagccctcgatgg

SEQ ID NO: 6939 - DNA, 20 bp, Homo Sapiens
gcagcgaagccctcgatggt

SEQ ID NO: 6940 - DNA, 20 bp, Homo Sapiens
cagcgaagccctcgatggtg

SEQ ID NO: 6941 - DNA, 20 bp, Homo Sapiens
agcgaagccctcgatggtgc

SEQ ID NO: 6942 - DNA, 20 bp, Homo Sapiens
gcgaagccctcgatggtgcg

SEQ ID NO: 6943 - DNA, 20 bp, Homo Sapiens
cgaagccctcgatggtgcgc

SEQ ID NO: 6944 - DNA, 20 bp, Homo Sapiens
gaagccctcgatggtgcgca

SEQ ID NO: 6945 - DNA, 20 bp, Homo Sapiens
aagccctcgatggtgcgcat

SEQ ID NO: 6946 - DNA, 20 bp, Homo Sapiens
agccctcgatggtgcgcatg

SEQ ID NO: 6947 - DNA, 20 bp, Homo Sapiens
gccctcgatggtgcgcatgg

SEQ ID NO: 6948 - DNA, 20 bp, Homo Sapiens
ccctcgatggtgcgcatggc

SEQ ID NO: 6949 - DNA, 20 bp, Homo Sapiens
cctcgatggtgcgcatggca

SEQ ID NO: 6950 - DNA, 20 bp, Homo Sapiens
ctcgatggtgcgcatggcat

SEQ ID NO: 6951 - DNA, 20 bp, Homo Sapiens
tcgatggtgcgcatggcatt

SEQ ID NO: 6952 - DNA, 20 bp, Homo Sapiens
cgatggtgcgcatggcattt

SEQ ID NO: 6953 - DNA, 20 bp, Homo Sapiens
gatggtgcgcatggcatttc

SEQ ID NO: 6954 - DNA, 20 bp, Homo Sapiens
atggtgcgcatggcatttcc

SEQ ID NO: 6955 - DNA, 20 bp, Homo Sapiens
tggtgcgcatggcatttcct

SEQ ID NO: 6956 - DNA, 20 bp, Homo Sapiens
ggtgcgcatggcatttcctg

SEQ ID NO: 6957 - DNA, 20 bp, Homo Sapiens
gtgcgcatggcatttcctgc

SEQ ID NO: 6958 - DNA, 20 bp, Homo Sapiens
tgcgcatggcatttcctgca

SEQ ID NO: 6959 - DNA, 20 bp, Homo Sapiens
gcgcatggcatttcctgcag

SEQ ID NO: 6960 - DNA, 20 bp, Homo Sapiens
cgcatggcatttcctgcagc

SEQ ID NO: 6961 - DNA, 20 bp, Homo Sapiens
gcatggcatttcctgcagcc

SEQ ID NO: 6962 - DNA, 20 bp, Homo Sapiens
catggcatttcctgcagcct

SEQ ID NO: 6963 - DNA, 20 bp, Homo Sapiens
atggcatttcctgcagcctc

SEQ ID NO: 6964 - DNA, 20 bp, Homo Sapiens
tggcatttcctgcagcctcc

SEQ ID NO: 6965 - DNA, 20 bp, Homo Sapiens
ggcatttcctgcagcctccc

SEQ ID NO: 6966 - DNA, 20 bp, Homo Sapiens
gcatttcctgcagcctcccc

SEQ ID NO: 6967 - DNA, 20 bp, Homo Sapiens
catttcctgcagcctcccct

SEQ ID NO: 6968 - DNA, 20 bp, Homo Sapiens
atttcctgcagcctcccctt

SEQ ID NO: 6969 - DNA, 20 bp, Homo Sapiens
tttcctgcagcctccccttg

SEQ ID NO: 6970 - DNA, 20 bp, Homo Sapiens
ttcctgcagcctccccttgg

SEQ ID NO: 6971 - DNA, 20 bp, Homo Sapiens
tcctgcagcctccccttggc

SEQ ID NO: 6972 - DNA, 20 bp, Homo Sapiens
cctgcagcctccccttggca

SEQ ID NO: 6973 - DNA, 20 bp, Homo Sapiens
ctgcagcctccccttggcat

SEQ ID NO: 6974 - DNA, 20 bp, Homo Sapiens
tgcagcctccccttggcatg

SEQ ID NO: 6975 - DNA, 20 bp, Homo Sapiens
gcagcctccccttggcatgg

SEQ ID NO: 6976 - DNA, 20 bp, Homo Sapiens
cagcctccccttggcatggg

SEQ ID NO: 6977 - DNA, 20 bp, Homo Sapiens
agcctccccttggcatggga

SEQ ID NO: 6978 - DNA, 20 bp, Homo Sapiens
gcctccccttggcatgggat

SEQ ID NO: 6979 - DNA, 20 bp, Homo Sapiens
cctccccttggcatgggatg

SEQ ID NO: 6980 - DNA, 20 bp, Homo Sapiens
ctccccttggcatgggatgg

SEQ ID NO: 6981 - DNA, 20 bp, Homo Sapiens
tccccttggcatgggatggc

SEQ ID NO: 6982 - DNA, 20 bp, Homo Sapiens
ccccttggcatgggatggca

SEQ ID NO: 6983 - DNA, 20 bp, Homo Sapiens
cccttggcatgggatggcat

SEQ ID NO: 6984 - DNA, 20 bp, Homo Sapiens
ccttggcatgggatggcatc

SEQ ID NO: 6985 - DNA, 20 bp, Homo Sapiens
cttggcatgggatggcatcc

SEQ ID NO: 6986 - DNA, 20 bp, Homo Sapiens
ttggcatgggatggcatcct

SEQ ID NO: 6987 - DNA, 20 bp, Homo Sapiens
tggcatgggatggcatcctg

SEQ ID NO: 6988 - DNA, 20 bp, Homo Sapiens
ggcatgggatggcatcctgg

SEQ ID NO: 6989 - DNA, 20 bp, Homo Sapiens
gcatgggatggcatcctggt

SEQ ID NO: 6990 - DNA, 20 bp, Homo Sapiens
catgggatggcatcctggtg

SEQ ID NO: 6991 - DNA, 20 bp, Homo Sapiens
atgggatggcatcctggtgt

SEQ ID NO: 6992 - DNA, 20 bp, Homo Sapiens
tgggatggcatcctggtgtg

SEQ ID NO: 6993 - DNA, 20 bp, Homo Sapiens
gggatggcatcctggtgtgc

SEQ ID NO: 6994 - DNA, 20 bp, Homo Sapiens
ggatggcatcctggtgtgca

SEQ ID NO: 6995 - DNA, 20 bp, Homo Sapiens
gatggcatcctggtgtgcac

SEQ ID NO: 6996 - DNA, 20 bp, Homo Sapiens
atggcatcctggtgtgcact

SEQ ID NO: 6997 - DNA, 20 bp, Homo Sapiens
tggcatcctggtgtgcactt

SEQ ID NO: 6998 - DNA, 20 bp, Homo Sapiens
ggcatcctggtgtgcacttt

SEQ ID NO: 6999 - DNA, 20 bp, Homo Sapiens
gcatcctggtgtgcactttg

SEQ ID NO: 7000 - DNA, 20 bp, Homo Sapiens
catcctggtgtgcactttgt

SEQ ID NO: 7001 - DNA, 20 bp, Homo Sapiens
atcctggtgtgcactttgtc

SEQ ID NO: 7002 - DNA, 20 bp, Homo Sapiens
tcctggtgtgcactttgtca

SEQ ID NO: 7003 - DNA, 20 bp, Homo Sapiens
cctggtgtgcactttgtcac

SEQ ID NO: 7004 - DNA, 20 bp, Homo Sapiens
ctggtgtgcactttgtcaca

SEQ ID NO: 7005 - DNA, 20 bp, Homo Sapiens
tggtgtgcactttgtcacac

SEQ ID NO: 7006 - DNA, 20 bp, Homo Sapiens
ggtgtgcactttgtcacact

SEQ ID NO: 7007 - DNA, 20 bp, Homo Sapiens
gtgtgcactttgtcacactg

SEQ ID NO: 7008 - DNA, 20 bp, Homo Sapiens
tgtgcactttgtcacactgc

SEQ ID NO: 7009 - DNA, 20 bp, Homo Sapiens
gtgcactttgtcacactgcg

SEQ ID NO: 7010 - DNA, 20 bp, Homo Sapiens
tgcactttgtcacactgcga

SEQ ID NO: 7011 - DNA, 20 bp, Homo Sapiens
gcactttgtcacactgcgat

SEQ ID NO: 7012 - DNA, 20 bp, Homo Sapiens
cactttgtcacactgcgatg

SEQ ID NO: 7013 - DNA, 20 bp, Homo Sapiens
actttgtcacactgcgatgg

SEQ ID NO: 7014 - DNA, 20 bp, Homo Sapiens
ctttgtcacactgcgatggg

SEQ ID NO: 7015 - DNA, 20 bp, Homo Sapiens
tttgtcacactgcgatggga

SEQ ID NO: 7016 - DNA, 20 bp, Homo Sapiens
ttgtcacactgcgatgggat

SEQ ID NO: 7017 - DNA, 20 bp, Homo Sapiens
tgtcacactgcgatgggatt

SEQ ID NO: 7018 - DNA, 20 bp, Homo Sapiens
gtcacactgcgatgggattt

SEQ ID NO: 7019 - DNA, 20 bp, Homo Sapiens
tcacactgcgatgggatttt

SEQ ID NO: 7020 - DNA, 20 bp, Homo Sapiens
cacactgcgatgggattttc

SEQ ID NO: 7021 - DNA, 20 bp, Homo Sapiens
acactgcgatgggattttcc

SEQ ID NO: 7022 - DNA, 20 bp, Homo Sapiens
cactgcgatgggattttccc

SEQ ID NO: 7023 - DNA, 20 bp, Homo Sapiens
actgcgatgggattttccca

SEQ ID NO: 7024 - DNA, 20 bp, Homo Sapiens
ctgcgatgggattttcccaa

SEQ ID NO: 7025 - DNA, 20 bp, Homo Sapiens
tgcgatgggattttcccaac

SEQ ID NO: 7026 - DNA, 20 bp, Homo Sapiens
gcgatgggattttcccaaca

SEQ ID NO: 7027 - DNA, 20 bp, Homo Sapiens
cgatgggattttcccaacat

SEQ ID NO: 7028 - DNA, 20 bp, Homo Sapiens
gatgggattttcccaacatg

SEQ ID NO: 7029 - DNA, 20 bp, Homo Sapiens
atgggattttcccaacatgc

SEQ ID NO: 7030 - DNA, 20 bp, Homo Sapiens
tgggattttcccaacatgca

SEQ ID NO: 7031 - DNA, 20 bp, Homo Sapiens
gggattttcccaacatgcac

SEQ ID NO: 7032 - DNA, 20 bp, Homo Sapiens
ggattttcccaacatgcaca

SEQ ID NO: 7033 - DNA, 20 bp, Homo Sapiens
gattttcccaacatgcacag

SEQ ID NO: 7034 - DNA, 20 bp, Homo Sapiens
attttcccaacatgcacaga

SEQ ID NO: 7035 - DNA, 20 bp, Homo Sapiens
ttttcccaacatgcacagaa

SEQ ID NO: 7036 - DNA, 20 bp, Homo Sapiens
tttcccaacatgcacagaag

SEQ ID NO: 7037 - DNA, 20 bp, Homo Sapiens
ttcccaacatgcacagaagc

SEQ ID NO: 7038 - DNA, 20 bp, Homo Sapiens
tcccaacatgcacagaagca

SEQ ID NO: 7039 - DNA, 20 bp, Homo Sapiens
cccaacatgcacagaagcag

SEQ ID NO: 7040 - DNA, 20 bp, Homo Sapiens
ccaacatgcacagaagcaga

SEQ ID NO: 7041 - DNA, 20 bp, Homo Sapiens
caacatgcacagaagcagag

SEQ ID NO: 7042 - DNA, 20 bp, Homo Sapiens
aacatgcacagaagcagaga

SEQ ID NO: 7043 - DNA, 20 bp, Homo Sapiens
acatgcacagaagcagagag

SEQ ID NO: 7044 - DNA, 20 bp, Homo Sapiens
catgcacagaagcagagaga

SEQ ID NO: 7045 - DNA, 20 bp, Homo Sapiens
atgcacagaagcagagagac

SEQ ID NO: 7046 - DNA, 20 bp, Homo Sapiens
tgcacagaagcagagagacg

SEQ ID NO: 7047 - DNA, 20 bp, Homo Sapiens
gcacagaagcagagagacga

SEQ ID NO: 7048 - DNA, 20 bp, Homo Sapiens
cacagaagcagagagacgag

SEQ ID NO: 7049 - DNA, 20 bp, Homo Sapiens
acagaagcagagagacgagt

SEQ ID NO: 7050 - DNA, 20 bp, Homo Sapiens
cagaagcagagagacgagtg

SEQ ID NO: 7051 - DNA, 20 bp, Homo Sapiens
agaagcagagagacgagtgc

SEQ ID NO: 7052 - DNA, 20 bp, Homo Sapiens
gaagcagagagacgagtgct

SEQ ID NO: 7053 - DNA, 20 bp, Homo Sapiens
aagcagagagacgagtgcta

SEQ ID NO: 7054 - DNA, 20 bp, Homo Sapiens
agcagagagacgagtgctag

SEQ ID NO: 7055 - DNA, 20 bp, Homo Sapiens
gcagagagacgagtgctaga

SEQ ID NO: 7056 - DNA, 20 bp, Homo Sapiens
cagagagacgagtgctagac

SEQ ID NO: 7057 - DNA, 20 bp, Homo Sapiens
agagagacgagtgctagacc

SEQ ID NO: 7058 - DNA, 20 bp, Homo Sapiens
gagagacgagtgctagaccc

SEQ ID NO: 7059 - DNA, 20 bp, Homo Sapiens
agagacgagtgctagacccc

SEQ ID NO: 7060 - DNA, 20 bp, Homo Sapiens
gagacgagtgctagaccccc

SEQ ID NO: 7061 - DNA, 20 bp, Homo Sapiens
agacgagtgctagacccccg

SEQ ID NO: 7062 - DNA, 20 bp, Homo Sapiens
gacgagtgctagacccccgc

SEQ ID NO: 7063 - DNA, 20 bp, Homo Sapiens
acgagtgctagacccccgcg

SEQ ID NO: 7064 - DNA, 20 bp, Homo Sapiens
cgagtgctagacccccgcgc

SEQ ID NO: 7065 - DNA, 20 bp, Homo Sapiens
gagtgctagacccccgcgct

SEQ ID NO: 7066 - DNA, 20 bp, Homo Sapiens
agtgctagacccccgcgctc

SEQ ID NO: 7067 - DNA, 20 bp, Homo Sapiens
gtgctagacccccgcgctcc

SEQ ID NO: 7068 - DNA, 20 bp, Homo Sapiens
tgctagacccccgcgctccc

SEQ ID NO: 7069 - DNA, 20 bp, Homo Sapiens
gctagacccccgcgctcccc

SEQ ID NO: 7070 - DNA, 20 bp, Homo Sapiens
ctagacccccgcgctcccca

SEQ ID NO: 7071 - DNA, 20 bp, Homo Sapiens
tagacccccgcgctccccag

SEQ ID NO: 7072 - DNA, 20 bp, Homo Sapiens
agacccccgcgctccccagt

SEQ ID NO: 7073 - DNA, 20 bp, Homo Sapiens
gacccccgcgctccccagtg

SEQ ID NO: 7074 - DNA, 20 bp, Homo Sapiens
acccccgcgctccccagtgc

SEQ ID NO: 7075 - DNA, 20 bp, Homo Sapiens
cccccgcgctccccagtgcc

SEQ ID NO: 7076 - DNA, 20 bp, Homo Sapiens
ccccgcgctccccagtgccc

SEQ ID NO: 7077 - DNA, 20 bp, Homo Sapiens
cccgcgctccccagtgccca

SEQ ID NO: 7078 - DNA, 20 bp, Homo Sapiens
ccgcgctccccagtgcccag

SEQ ID NO: 7079 - DNA, 20 bp, Homo Sapiens
cgcgctccccagtgcccagc

SEQ ID NO: 7080 - DNA, 20 bp, Homo Sapiens
gcgctccccagtgcccagcc

SEQ ID NO: 7081 - DNA, 20 bp, Homo Sapiens
cgctccccagtgcccagccc

SEQ ID NO: 7082 - DNA, 20 bp, Homo Sapiens
gctccccagtgcccagcccc

SEQ ID NO: 7083 - DNA, 20 bp, Homo Sapiens
ctccccagtgcccagccccg

SEQ ID NO: 7084 - DNA, 20 bp, Homo Sapiens
tccccagtgcccagccccga

SEQ ID NO: 7085 - DNA, 20 bp, Homo Sapiens
ccccagtgcccagccccgac

SEQ ID NO: 7086 - DNA, 20 bp, Homo Sapiens
cccagtgcccagccccgacc

SEQ ID NO: 7087 - DNA, 20 bp, Homo Sapiens
ccagtgcccagccccgacca

SEQ ID NO: 7088 - DNA, 20 bp, Homo Sapiens
cagtgcccagccccgaccag

SEQ ID NO: 7089 - DNA, 20 bp, Homo Sapiens
agtgcccagccccgaccagg

SEQ ID NO: 7090 - DNA, 20 bp, Homo Sapiens
gtgcccagccccgaccaggg

SEQ ID NO: 7091 - DNA, 20 bp, Homo Sapiens
tgcccagccccgaccagggt

SEQ ID NO: 7092 - DNA, 20 bp, Homo Sapiens
gcccagccccgaccagggtg

SEQ ID NO: 7093 - DNA, 20 bp, Homo Sapiens
cccagccccgaccagggtgt

SEQ ID NO: 7094 - DNA, 20 bp, Homo Sapiens
ccagccccgaccagggtgtc

SEQ ID NO: 7095 - DNA, 20 bp, Homo Sapiens
cagccccgaccagggtgtcc

SEQ ID NO: 7096 - DNA, 20 bp, Homo Sapiens
agccccgaccagggtgtcca

SEQ ID NO: 7097 - DNA, 20 bp, Homo Sapiens
gccccgaccagggtgtccag

SEQ ID NO: 7098 - DNA, 20 bp, Homo Sapiens
ccccgaccagggtgtccagg

SEQ ID NO: 7099 - DNA, 20 bp, Homo Sapiens
cccgaccagggtgtccaggg

SEQ ID NO: 7100 - DNA, 20 bp, Homo Sapiens
ccgaccagggtgtccagggc

SEQ ID NO: 7101 - DNA, 20 bp, Homo Sapiens
cgaccagggtgtccagggcg

SEQ ID NO: 7102 - DNA, 20 bp, Homo Sapiens
gaccagggtgtccagggcgg

SEQ ID NO: 7103 - DNA, 20 bp, Homo Sapiens
accagggtgtccagggcggg

SEQ ID NO: 7104 - DNA, 20 bp, Homo Sapiens
ccagggtgtccagggcgggt

SEQ ID NO: 7105 - DNA, 20 bp, Homo Sapiens
cagggtgtccagggcgggtc

SEQ ID NO: 7106 - DNA, 20 bp, Homo Sapiens
agggtgtccagggcgggtcc

SEQ ID NO: 7107 - DNA, 20 bp, Homo Sapiens
gggtgtccagggcgggtcca

SEQ ID NO: 7108 - DNA, 20 bp, Homo Sapiens
ggtgtccagggcgggtccag

SEQ ID NO: 7109 - DNA, 20 bp, Homo Sapiens
gtgtccagggcgggtccagg

SEQ ID NO: 7110 - DNA, 20 bp, Homo Sapiens
tgtccagggcgggtccaggc

SEQ ID NO: 7111 - DNA, 20 bp, Homo Sapiens
gtccagggcgggtccaggca

SEQ ID NO: 7112 - DNA, 20 bp, Homo Sapiens
tccagggcgggtccaggcac

SEQ ID NO: 7113 - DNA, 20 bp, Homo Sapiens
ccagggcgggtccaggcacc

SEQ ID NO: 7114 - DNA, 20 bp, Homo Sapiens
cagggcgggtccaggcaccg

SEQ ID NO: 7115 - DNA, 20 bp, Homo Sapiens
agggcgggtccaggcaccgg

SEQ ID NO: 7116 - DNA, 20 bp, Homo Sapiens
gggcgggtccaggcaccggc

SEQ ID NO: 7117 - DNA, 20 bp, Homo Sapiens
ggcgggtccaggcaccggcg

SEQ ID NO: 7118 - DNA, 20 bp, Homo Sapiens
gcgggtccaggcaccggcgc

SEQ ID NO: 7119 - DNA, 20 bp, Homo Sapiens
cgggtccaggcaccggcgcc

SEQ ID NO: 7120 - DNA, 20 bp, Homo Sapiens
gggtccaggcaccggcgccc

SEQ ID NO: 7121 - DNA, 20 bp, Homo Sapiens
ggtccaggcaccggcgccca

SEQ ID NO: 7122 - DNA, 20 bp, Homo Sapiens
gtccaggcaccggcgcccag

SEQ ID NO: 7123 - DNA, 20 bp, Homo Sapiens
tccaggcaccggcgcccagc

SEQ ID NO: 7124 - DNA, 20 bp, Homo Sapiens
ccaggcaccggcgcccagcc

SEQ ID NO: 7125 - DNA, 20 bp, Homo Sapiens
caggcaccggcgcccagccc

SEQ ID NO: 7126 - DNA, 20 bp, Homo Sapiens
aggcaccggcgcccagcccc

SEQ ID NO: 7127 - DNA, 20 bp, Homo Sapiens
ggcaccggcgcccagccccc

SEQ ID NO: 7128 - DNA, 20 bp, Homo Sapiens
gcaccggcgcccagccccca

SEQ ID NO: 7129 - DNA, 20 bp, Homo Sapiens
caccggcgcccagcccccat

SEQ ID NO: 7130 - DNA, 20 bp, Homo Sapiens
accggcgcccagcccccatg

SEQ ID NO: 7131 - DNA, 20 bp, Homo Sapiens
ccggcgcccagcccccatgg

SEQ ID NO: 7132 - DNA, 20 bp, Homo Sapiens
cggcgcccagcccccatggg

SEQ ID NO: 7133 - DNA, 20 bp, Homo Sapiens
ggcgcccagcccccatgggg

SEQ ID NO: 7134 - DNA, 20 bp, Homo Sapiens
gcgcccagcccccatggggt

SEQ ID NO: 7135 - DNA, 20 bp, Homo Sapiens
cgcccagcccccatggggtg

SEQ ID NO: 7136 - DNA, 20 bp, Homo Sapiens
gcccagcccccatggggtgt

SEQ ID NO: 7137 - DNA, 20 bp, Homo Sapiens
cccagcccccatggggtgtc

SEQ ID NO: 7138 - DNA, 20 bp, Homo Sapiens
ccagcccccatggggtgtcc

SEQ ID NO: 7139 - DNA, 20 bp, Homo Sapiens
cagcccccatggggtgtccg

SEQ ID NO: 7140 - DNA, 20 bp, Homo Sapiens
agcccccatggggtgtccgg

SEQ ID NO: 7141 - DNA, 20 bp, Homo Sapiens
gcccccatggggtgtccgga

SEQ ID NO: 7142 - DNA, 20 bp, Homo Sapiens
cccccatggggtgtccggag

SEQ ID NO: 7143 - DNA, 20 bp, Homo Sapiens
ccccatggggtgtccggagt

SEQ ID NO: 7144 - DNA, 20 bp, Homo Sapiens
cccatggggtgtccggagtg

SEQ ID NO: 7145 - DNA, 20 bp, Homo Sapiens
ccatggggtgtccggagtgg

SEQ ID NO: 7146 - DNA, 20 bp, Homo Sapiens
catggggtgtccggagtggg

SEQ ID NO: 7147 - DNA, 20 bp, Homo Sapiens
atggggtgtccggagtgggt

SEQ ID NO: 7148 - DNA, 20 bp, Homo Sapiens
tggggtgtccggagtgggtc

SEQ ID NO: 7149 - DNA, 20 bp, Homo Sapiens
ggggtgtccggagtgggtcc

SEQ ID NO: 7150 - DNA, 20 bp, Homo Sapiens
gggtgtccggagtgggtcca

SEQ ID NO: 7151 - DNA, 20 bp, Homo Sapiens
ggtgtccggagtgggtccag

SEQ ID NO: 7152 - DNA, 20 bp, Homo Sapiens
gtgtccggagtgggtccagg

SEQ ID NO: 7153 - DNA, 20 bp, Homo Sapiens
tgtccggagtgggtccaggc

SEQ ID NO: 7154 - DNA, 20 bp, Homo Sapiens
gtccggagtgggtccaggca

SEQ ID NO: 7155 - DNA, 20 bp, Homo Sapiens
tccggagtgggtccaggcac

SEQ ID NO: 7156 - DNA, 20 bp, Homo Sapiens
ccggagtgggtccaggcacc

SEQ ID NO: 7157 - DNA, 20 bp, Homo Sapiens
cggagtgggtccaggcaccg

SEQ ID NO: 7158 - DNA, 20 bp, Homo Sapiens
ggagtgggtccaggcaccgg

SEQ ID NO: 7159 - DNA, 20 bp, Homo Sapiens
gagtgggtccaggcaccggc

SEQ ID NO: 7160 - DNA, 20 bp, Homo Sapiens
agtgggtccaggcaccggcg

SEQ ID NO: 7161 - DNA, 20 bp, Homo Sapiens
gtgggtccaggcaccggcgc

SEQ ID NO: 7162 - DNA, 20 bp, Homo Sapiens
tgggtccaggcaccggcgcc

SEQ ID NO: 7163 - DNA, 20 bp, Homo Sapiens
gggtccaggcaccggcgccc

SEQ ID NO: 7164 - DNA, 20 bp, Homo Sapiens
ggtccaggcaccggcgccca

SEQ ID NO: 7165 - DNA, 20 bp, Homo Sapiens
gtccaggcaccggcgcccag

SEQ ID NO: 7166 - DNA, 20 bp, Homo Sapiens
tccaggcaccggcgcccagc

SEQ ID NO: 7167 - DNA, 20 bp, Homo Sapiens
ccaggcaccggcgcccagcc

SEQ ID NO: 7168 - DNA, 20 bp, Homo Sapiens
caggcaccggcgcccagccc

SEQ ID NO: 7169 - DNA, 20 bp, Homo Sapiens
aggcaccggcgcccagcccc

SEQ ID NO: 7170 - DNA, 20 bp, Homo Sapiens
ggcaccggcgcccagccccc

SEQ ID NO: 7171 - DNA, 20 bp, Homo Sapiens
gcaccggcgcccagcccccg

SEQ ID NO: 7172 - DNA, 20 bp, Homo Sapiens
caccggcgcccagcccccgt

SEQ ID NO: 7173 - DNA, 20 bp, Homo Sapiens
accggcgcccagcccccgtg

SEQ ID NO: 7174 - DNA, 20 bp, Homo Sapiens
ccggcgcccagcccccgtgg

SEQ ID NO: 7175 - DNA, 20 bp, Homo Sapiens
cggcgcccagcccccgtggg

SEQ ID NO: 7176 - DNA, 20 bp, Homo Sapiens
ggcgcccagcccccgtgggg

SEQ ID NO: 7177 - DNA, 20 bp, Homo Sapiens
gcgcccagcccccgtggggt

SEQ ID NO: 7178 - DNA, 20 bp, Homo Sapiens
cgcccagcccccgtggggtg

SEQ ID NO: 7179 - DNA, 20 bp, Homo Sapiens
gcccagcccccgtggggtgt

SEQ ID NO: 7180 - DNA, 20 bp, Homo Sapiens
cccagcccccgtggggtgtc

SEQ ID NO: 7181 - DNA, 20 bp, Homo Sapiens
ccagcccccgtggggtgtcc

SEQ ID NO: 7182 - DNA, 20 bp, Homo Sapiens
cagcccccgtggggtgtcca

SEQ ID NO: 7183 - DNA, 20 bp, Homo Sapiens
agcccccgtggggtgtccag

SEQ ID NO: 7184 - DNA, 20 bp, Homo Sapiens
gcccccgtggggtgtccagg

SEQ ID NO: 7185 - DNA, 20 bp, Homo Sapiens
cccccgtggggtgtccaggg

SEQ ID NO: 7186 - DNA, 20 bp, Homo Sapiens
ccccgtggggtgtccagggc

SEQ ID NO: 7187 - DNA, 20 bp, Homo Sapiens
cccgtggggtgtccagggcg

SEQ ID NO: 7188 - DNA, 20 bp, Homo Sapiens
ccgtggggtgtccagggcgg

SEQ ID NO: 7189 - DNA, 20 bp, Homo Sapiens
cgtggggtgtccagggcggg

SEQ ID NO: 7190 - DNA, 20 bp, Homo Sapiens
gtggggtgtccagggcgggt

SEQ ID NO: 7191 - DNA, 20 bp, Homo Sapiens
tggggtgtccagggcgggtc

SEQ ID NO: 7192 - DNA, 20 bp, Homo Sapiens
ggggtgtccagggcgggtcc

SEQ ID NO: 7193 - DNA, 20 bp, Homo Sapiens
gggtgtccagggcgggtcca

SEQ ID NO: 7194 - DNA, 20 bp, Homo Sapiens
ggtgtccagggcgggtccag

SEQ ID NO: 7195 - DNA, 20 bp, Homo Sapiens
gtgtccagggcgggtccagg

SEQ ID NO: 7196 - DNA, 20 bp, Homo Sapiens
tgtccagggcgggtccaggc

SEQ ID NO: 7197 - DNA, 20 bp, Homo Sapiens
gtccagggcgggtccaggca

SEQ ID NO: 7198 - DNA, 20 bp, Homo Sapiens
tccagggcgggtccaggcac

SEQ ID NO: 7199 - DNA, 20 bp, Homo Sapiens
ccagggcgggtccaggcacc

SEQ ID NO: 7200 - DNA, 20 bp, Homo Sapiens
cagggcgggtccaggcaccg

SEQ ID NO: 7201 - DNA, 20 bp, Homo Sapiens
agggcgggtccaggcaccgg

SEQ ID NO: 7202 - DNA, 20 bp, Homo Sapiens
gggcgggtccaggcaccggc

SEQ ID NO: 7203 - DNA, 20 bp, Homo Sapiens
ggcgggtccaggcaccggcg

SEQ ID NO: 7204 - DNA, 20 bp, Homo Sapiens
gcgggtccaggcaccggcgc

SEQ ID NO: 7205 - DNA, 20 bp, Homo Sapiens
cgggtccaggcaccggcgcc

SEQ ID NO: 7206 - DNA, 20 bp, Homo Sapiens
gggtccaggcaccggcgccc

SEQ ID NO: 7207 - DNA, 20 bp, Homo Sapiens
ggtccaggcaccggcgccca

SEQ ID NO: 7208 - DNA, 20 bp, Homo Sapiens
gtccaggcaccggcgcccag

SEQ ID NO: 7209 - DNA, 20 bp, Homo Sapiens
tccaggcaccggcgcccagc

SEQ ID NO: 7210 - DNA, 20 bp, Homo Sapiens
ccaggcaccggcgcccagcc

SEQ ID NO: 7211 - DNA, 20 bp, Homo Sapiens
caggcaccggcgcccagccc

SEQ ID NO: 7212 - DNA, 20 bp, Homo Sapiens
aggcaccggcgcccagcccc

SEQ ID NO: 7213 - DNA, 20 bp, Homo Sapiens
ggcaccggcgcccagcccct

SEQ ID NO: 7214 - DNA, 20 bp, Homo Sapiens
gcaccggcgcccagcccctg

SEQ ID NO: 7215 - DNA, 20 bp, Homo Sapiens
caccggcgcccagcccctgt

SEQ ID NO: 7216 - DNA, 20 bp, Homo Sapiens
accggcgcccagcccctgtg

SEQ ID NO: 7217 - DNA, 20 bp, Homo Sapiens
ccggcgcccagcccctgtgg

SEQ ID NO: 7218 - DNA, 20 bp, Homo Sapiens
cggcgcccagcccctgtggg

SEQ ID NO: 7219 - DNA, 20 bp, Homo Sapiens
ggcgcccagcccctgtgggg

SEQ ID NO: 7220 - DNA, 20 bp, Homo Sapiens
gcgcccagcccctgtggggt

SEQ ID NO: 7221 - DNA, 20 bp, Homo Sapiens
cgcccagcccctgtggggtg

SEQ ID NO: 7222 - DNA, 20 bp, Homo Sapiens
gcccagcccctgtggggtgt

SEQ ID NO: 7223 - DNA, 20 bp, Homo Sapiens
cccagcccctgtggggtgtc

SEQ ID NO: 7224 - DNA, 20 bp, Homo Sapiens
ccagcccctgtggggtgtcc

SEQ ID NO: 7225 - DNA, 20 bp, Homo Sapiens
cagcccctgtggggtgtccg

SEQ ID NO: 7226 - DNA, 20 bp, Homo Sapiens
agcccctgtggggtgtccgg

SEQ ID NO: 7227 - DNA, 20 bp, Homo Sapiens
gcccctgtggggtgtccgga

SEQ ID NO: 7228 - DNA, 20 bp, Homo Sapiens
cccctgtggggtgtccggag

SEQ ID NO: 7229 - DNA, 20 bp, Homo Sapiens
ccctgtggggtgtccggagt

SEQ ID NO: 7230 - DNA, 20 bp, Homo Sapiens
cctgtggggtgtccggagtg

SEQ ID NO: 7231 - DNA, 20 bp, Homo Sapiens
ctgtggggtgtccggagtgg

SEQ ID NO: 7232 - DNA, 20 bp, Homo Sapiens
tgtggggtgtccggagtggg

SEQ ID NO: 7233 - DNA, 20 bp, Homo Sapiens
gtggggtgtccggagtgggt

SEQ ID NO: 7234 - DNA, 20 bp, Homo Sapiens
tggggtgtccggagtgggtc

SEQ ID NO: 7235 - DNA, 20 bp, Homo Sapiens
ggggtgtccggagtgggtcc

SEQ ID NO: 7236 - DNA, 20 bp, Homo Sapiens
gggtgtccggagtgggtccg

SEQ ID NO: 7237 - DNA, 20 bp, Homo Sapiens
ggtgtccggagtgggtccgg

SEQ ID NO: 7238 - DNA, 20 bp, Homo Sapiens
gtgtccggagtgggtccggg

SEQ ID NO: 7239 - DNA, 20 bp, Homo Sapiens
tgtccggagtgggtccgggc

SEQ ID NO: 7240 - DNA, 20 bp, Homo Sapiens
gtccggagtgggtccgggca

SEQ ID NO: 7241 - DNA, 20 bp, Homo Sapiens
tccggagtgggtccgggcac

SEQ ID NO: 7242 - DNA, 20 bp, Homo Sapiens
ccggagtgggtccgggcacc

SEQ ID NO: 7243 - DNA, 20 bp, Homo Sapiens
cggagtgggtccgggcaccg

SEQ ID NO: 7244 - DNA, 20 bp, Homo Sapiens
ggagtgggtccgggcaccgc

SEQ ID NO: 7245 - DNA, 20 bp, Homo Sapiens
gagtgggtccgggcaccgcc

SEQ ID NO: 7246 - DNA, 20 bp, Homo Sapiens
agtgggtccgggcaccgcca

SEQ ID NO: 7247 - DNA, 20 bp, Homo Sapiens
gtgggtccgggcaccgccag

SEQ ID NO: 7248 - DNA, 20 bp, Homo Sapiens
tgggtccgggcaccgccagc

SEQ ID NO: 7249 - DNA, 20 bp, Homo Sapiens
gggtccgggcaccgccagct

SEQ ID NO: 7250 - DNA, 20 bp, Homo Sapiens
ggtccgggcaccgccagctt

SEQ ID NO: 7251 - DNA, 20 bp, Homo Sapiens
gtccgggcaccgccagcttc

SEQ ID NO: 7252 - DNA, 20 bp, Homo Sapiens
tccgggcaccgccagcttct

SEQ ID NO: 7253 - DNA, 20 bp, Homo Sapiens
ccgggcaccgccagcttctc

SEQ ID NO: 7254 - DNA, 20 bp, Homo Sapiens
cgggcaccgccagcttctct

SEQ ID NO: 7255 - DNA, 20 bp, Homo Sapiens
gggcaccgccagcttctctc

SEQ ID NO: 7256 - DNA, 20 bp, Homo Sapiens
ggcaccgccagcttctctct

SEQ ID NO: 7257 - DNA, 20 bp, Homo Sapiens
gcaccgccagcttctctctg

SEQ ID NO: 7258 - DNA, 20 bp, Homo Sapiens
caccgccagcttctctctgt

SEQ ID NO: 7259 - DNA, 20 bp, Homo Sapiens
accgccagcttctctctgtg

SEQ ID NO: 7260 - DNA, 20 bp, Homo Sapiens
ccgccagcttctctctgtgg

SEQ ID NO: 7261 - DNA, 20 bp, Homo Sapiens
cgccagcttctctctgtggc

SEQ ID NO: 7262 - DNA, 20 bp, Homo Sapiens
gccagcttctctctgtggca

SEQ ID NO: 7263 - DNA, 20 bp, Homo Sapiens
ccagcttctctctgtggcag

SEQ ID NO: 7264 - DNA, 20 bp, Homo Sapiens
cagcttctctctgtggcagc

SEQ ID NO: 7265 - DNA, 20 bp, Homo Sapiens
agcttctctctgtggcagcc

SEQ ID NO: 7266 - DNA, 20 bp, Homo Sapiens
gcttctctctgtggcagcca

SEQ ID NO: 7267 - DNA, 20 bp, Homo Sapiens
cttctctctgtggcagccac

SEQ ID NO: 7268 - DNA, 20 bp, Homo Sapiens
ttctctctgtggcagccact

SEQ ID NO: 7269 - DNA, 20 bp, Homo Sapiens
tctctctgtggcagccactc

SEQ ID NO: 7270 - DNA, 20 bp, Homo Sapiens
ctctctgtggcagccactcc

SEQ ID NO: 7271 - DNA, 20 bp, Homo Sapiens
tctctgtggcagccactcct

SEQ ID NO: 7272 - DNA, 20 bp, Homo Sapiens
ctctgtggcagccactcctg

SEQ ID NO: 7273 - DNA, 20 bp, Homo Sapiens
tctgtggcagccactcctgc

SEQ ID NO: 7274 - DNA, 20 bp, Homo Sapiens
ctgtggcagccactcctgca

SEQ ID NO: 7275 - DNA, 20 bp, Homo Sapiens
tgtggcagccactcctgcag

SEQ ID NO: 7276 - DNA, 20 bp, Homo Sapiens
gtggcagccactcctgcagc

SEQ ID NO: 7277 - DNA, 20 bp, Homo Sapiens
tggcagccactcctgcagct

SEQ ID NO: 7278 - DNA, 20 bp, Homo Sapiens
ggcagccactcctgcagctc

SEQ ID NO: 7279 - DNA, 20 bp, Homo Sapiens
gcagccactcctgcagctct

SEQ ID NO: 7280 - DNA, 20 bp, Homo Sapiens
cagccactcctgcagctctc

SEQ ID NO: 7281 - DNA, 20 bp, Homo Sapiens
agccactcctgcagctctcg

SEQ ID NO: 7282 - DNA, 20 bp, Homo Sapiens
gccactcctgcagctctcgt

SEQ ID NO: 7283 - DNA, 20 bp, Homo Sapiens
ccactcctgcagctctcgtt

SEQ ID NO: 7284 - DNA, 20 bp, Homo Sapiens
cactcctgcagctctcgttt

SEQ ID NO: 7285 - DNA, 20 bp, Homo Sapiens
actcctgcagctctcgtttg

SEQ ID NO: 7286 - DNA, 20 bp, Homo Sapiens
ctcctgcagctctcgtttgc

SEQ ID NO: 7287 - DNA, 20 bp, Homo Sapiens
tcctgcagctctcgtttgcc

SEQ ID NO: 7288 - DNA, 20 bp, Homo Sapiens
cctgcagctctcgtttgccc

SEQ ID NO: 7289 - DNA, 20 bp, Homo Sapiens
ctgcagctctcgtttgcccc

SEQ ID NO: 7290 - DNA, 20 bp, Homo Sapiens
tgcagctctcgtttgcccct

SEQ ID NO: 7291 - DNA, 20 bp, Homo Sapiens
gcagctctcgtttgcccctc

SEQ ID NO: 7292 - DNA, 20 bp, Homo Sapiens
cagctctcgtttgcccctca

SEQ ID NO: 7293 - DNA, 20 bp, Homo Sapiens
agctctcgtttgcccctcag

SEQ ID NO: 7294 - DNA, 20 bp, Homo Sapiens
gctctcgtttgcccctcagt

SEQ ID NO: 7295 - DNA, 20 bp, Homo Sapiens
ctctcgtttgcccctcagtt

SEQ ID NO: 7296 - DNA, 20 bp, Homo Sapiens
tctcgtttgcccctcagttc

SEQ ID NO: 7297 - DNA, 20 bp, Homo Sapiens
ctcgtttgcccctcagttcc

SEQ ID NO: 7298 - DNA, 20 bp, Homo Sapiens
tcgtttgcccctcagttcca

SEQ ID NO: 7299 - DNA, 20 bp, Homo Sapiens
cgtttgcccctcagttccag

SEQ ID NO: 7300 - DNA, 20 bp, Homo Sapiens
gtttgcccctcagttccagg

SEQ ID NO: 7301 - DNA, 20 bp, Homo Sapiens
tttgcccctcagttccagga

SEQ ID NO: 7302 - DNA, 20 bp, Homo Sapiens
ttgcccctcagttccaggag

SEQ ID NO: 7303 - DNA, 20 bp, Homo Sapiens
tgcccctcagttccaggagc

SEQ ID NO: 7304 - DNA, 20 bp, Homo Sapiens
gcccctcagttccaggagca

SEQ ID NO: 7305 - DNA, 20 bp, Homo Sapiens
cccctcagttccaggagcaa

SEQ ID NO: 7306 - DNA, 20 bp, Homo Sapiens
ccctcagttccaggagcaac

SEQ ID NO: 7307 - DNA, 20 bp, Homo Sapiens
cctcagttccaggagcaaca

SEQ ID NO: 7308 - DNA, 20 bp, Homo Sapiens
ctcagttccaggagcaacat

SEQ ID NO: 7309 - DNA, 20 bp, Homo Sapiens
tcagttccaggagcaacata

SEQ ID NO: 7310 - DNA, 20 bp, Homo Sapiens
cagttccaggagcaacatag

SEQ ID NO: 7311 - DNA, 20 bp, Homo Sapiens
agttccaggagcaacataga

SEQ ID NO: 7312 - DNA, 20 bp, Homo Sapiens
gttccaggagcaacatagat

SEQ ID NO: 7313 - DNA, 20 bp, Homo Sapiens
ttccaggagcaacatagatg

SEQ ID NO: 7314 - DNA, 20 bp, Homo Sapiens
tccaggagcaacatagatgt

SEQ ID NO: 7315 - DNA, 20 bp, Homo Sapiens
ccaggagcaacatagatgtg

SEQ ID NO: 7316 - DNA, 20 bp, Homo Sapiens
caggagcaacatagatgtgg

SEQ ID NO: 7317 - DNA, 20 bp, Homo Sapiens
aggagcaacatagatgtgga

SEQ ID NO: 7318 - DNA, 20 bp, Homo Sapiens
ggagcaacatagatgtggat

SEQ ID NO: 7319 - DNA, 20 bp, Homo Sapiens
gagcaacatagatgtggatt

SEQ ID NO: 7320 - DNA, 20 bp, Homo Sapiens
agcaacatagatgtggattc

SEQ ID NO: 7321 - DNA, 20 bp, Homo Sapiens
gcaacatagatgtggattcc

SEQ ID NO: 7322 - DNA, 20 bp, Homo Sapiens
caacatagatgtggattcct

SEQ ID NO: 7323 - DNA, 20 bp, Homo Sapiens
aacatagatgtggattcctg

SEQ ID NO: 7324 - DNA, 20 bp, Homo Sapiens
acatagatgtggattcctgt

SEQ ID NO: 7325 - DNA, 20 bp, Homo Sapiens
catagatgtggattcctgtc

SEQ ID NO: 7326 - DNA, 20 bp, Homo Sapiens
atagatgtggattcctgtcc

SEQ ID NO: 7327 - DNA, 20 bp, Homo Sapiens
tagatgtggattcctgtcca

SEQ ID NO: 7328 - DNA, 20 bp, Homo Sapiens
agatgtggattcctgtccaa

SEQ ID NO: 7329 - DNA, 20 bp, Homo Sapiens
gatgtggattcctgtccaat

SEQ ID NO: 7330 - DNA, 20 bp, Homo Sapiens
atgtggattcctgtccaatt

SEQ ID NO: 7331 - DNA, 20 bp, Homo Sapiens
tgtggattcctgtccaattt

SEQ ID NO: 7332 - DNA, 20 bp, Homo Sapiens
gtggattcctgtccaatttg

SEQ ID NO: 7333 - DNA, 20 bp, Homo Sapiens
tggattcctgtccaatttgg

SEQ ID NO: 7334 - DNA, 20 bp, Homo Sapiens
ggattcctgtccaatttggg

SEQ ID NO: 7335 - DNA, 20 bp, Homo Sapiens
gattcctgtccaatttggga

SEQ ID NO: 7336 - DNA, 20 bp, Homo Sapiens
attcctgtccaatttgggaa

SEQ ID NO: 7337 - DNA, 20 bp, Homo Sapiens
ttcctgtccaatttgggaaa

SEQ ID NO: 7338 - DNA, 20 bp, Homo Sapiens
tcctgtccaatttgggaaaa

SEQ ID NO: 7339 - DNA, 20 bp, Homo Sapiens
cctgtccaatttgggaaaaa

SEQ ID NO: 7340 - DNA, 20 bp, Homo Sapiens
ctgtccaatttgggaaaaat

SEQ ID NO: 7341 - DNA, 20 bp, Homo Sapiens
tgtccaatttgggaaaaatg

SEQ ID NO: 7342 - DNA, 20 bp, Homo Sapiens
gtccaatttgggaaaaatgt

SEQ ID NO: 7343 - DNA, 20 bp, Homo Sapiens
tccaatttgggaaaaatgtc

SEQ ID NO: 7344 - DNA, 20 bp, Homo Sapiens
ccaatttgggaaaaatgtcc

SEQ ID NO: 7345 - DNA, 20 bp, Homo Sapiens
caatttgggaaaaatgtcca

SEQ ID NO: 7346 - DNA, 20 bp, Homo Sapiens
aatttgggaaaaatgtccac

SEQ ID NO: 7347 - DNA, 20 bp, Homo Sapiens
atttgggaaaaatgtccaca

SEQ ID NO: 7348 - DNA, 20 bp, Homo Sapiens
tttgggaaaaatgtccacac

SEQ ID NO: 7349 - DNA, 20 bp, Homo Sapiens
ttgggaaaaatgtccacaca

SEQ ID NO: 7350 - DNA, 20 bp, Homo Sapiens
tgggaaaaatgtccacacac

SEQ ID NO: 7351 - DNA, 20 bp, Homo Sapiens
gggaaaaatgtccacacacg

SEQ ID NO: 7352 - DNA, 20 bp, Homo Sapiens
ggaaaaatgtccacacacgg

SEQ ID NO: 7353 - DNA, 20 bp, Homo Sapiens
gaaaaatgtccacacacggt

SEQ ID NO: 7354 - DNA, 20 bp, Homo Sapiens
aaaaatgtccacacacggtc

SEQ ID NO: 7355 - DNA, 20 bp, Homo Sapiens
aaaatgtccacacacggtca

SEQ ID NO: 7356 - DNA, 20 bp, Homo Sapiens
aaatgtccacacacggtcac

SEQ ID NO: 7357 - DNA, 20 bp, Homo Sapiens
aatgtccacacacggtcacc

SEQ ID NO: 7358 - DNA, 20 bp, Homo Sapiens
atgtccacacacggtcaccc

SEQ ID NO: 7359 - DNA, 20 bp, Homo Sapiens
tgtccacacacggtcaccca

SEQ ID NO: 7360 - DNA, 20 bp, Homo Sapiens
gtccacacacggtcacccac

SEQ ID NO: 7361 - DNA, 20 bp, Homo Sapiens
tccacacacggtcacccacc

SEQ ID NO: 7362 - DNA, 20 bp, Homo Sapiens
ccacacacggtcacccacct

SEQ ID NO: 7363 - DNA, 20 bp, Homo Sapiens
cacacacggtcacccacctg

SEQ ID NO: 7364 - DNA, 20 bp, Homo Sapiens
acacacggtcacccacctgg

SEQ ID NO: 7365 - DNA, 20 bp, Homo Sapiens
cacacggtcacccacctggc

SEQ ID NO: 7366 - DNA, 20 bp, Homo Sapiens
acacggtcacccacctggca

SEQ ID NO: 7367 - DNA, 20 bp, Homo Sapiens
cacggtcacccacctggcag

SEQ ID NO: 7368 - DNA, 20 bp, Homo Sapiens
acggtcacccacctggcagg

SEQ ID NO: 7369 - DNA, 20 bp, Homo Sapiens
cggtcacccacctggcaggt

SEQ ID NO: 7370 - DNA, 20 bp, Homo Sapiens
ggtcacccacctggcaggtg

SEQ ID NO: 7371 - DNA, 20 bp, Homo Sapiens
gtcacccacctggcaggtgc

SEQ ID NO: 7372 - DNA, 20 bp, Homo Sapiens
tcacccacctggcaggtgcc

SEQ ID NO: 7373 - DNA, 20 bp, Homo Sapiens
cacccacctggcaggtgcct

SEQ ID NO: 7374 - DNA, 20 bp, Homo Sapiens
acccacctggcaggtgcctc

SEQ ID NO: 7375 - DNA, 20 bp, Homo Sapiens
cccacctggcaggtgcctct

SEQ ID NO: 7376 - DNA, 20 bp, Homo Sapiens
ccacctggcaggtgcctctg

SEQ ID NO: 7377 - DNA, 20 bp, Homo Sapiens
cacctggcaggtgcctctgg

SEQ ID NO: 7378 - DNA, 20 bp, Homo Sapiens
acctggcaggtgcctctggc

SEQ ID NO: 7379 - DNA, 20 bp, Homo Sapiens
cctggcaggtgcctctggct

SEQ ID NO: 7380 - DNA, 20 bp, Homo Sapiens
ctggcaggtgcctctggctg

SEQ ID NO: 7381 - DNA, 20 bp, Homo Sapiens
tggcaggtgcctctggctgc

SEQ ID NO: 7382 - DNA, 20 bp, Homo Sapiens
ggcaggtgcctctggctgca

SEQ ID NO: 7383 - DNA, 20 bp, Homo Sapiens
gcaggtgcctctggctgcaa

SEQ ID NO: 7384 - DNA, 20 bp, Homo Sapiens
caggtgcctctggctgcaag

SEQ ID NO: 7385 - DNA, 20 bp, Homo Sapiens
aggtgcctctggctgcaagg

SEQ ID NO: 7386 - DNA, 20 bp, Homo Sapiens
ggtgcctctggctgcaaggg

SEQ ID NO: 7387 - DNA, 20 bp, Homo Sapiens
gtgcctctggctgcaagggg

SEQ ID NO: 7388 - DNA, 20 bp, Homo Sapiens
tgcctctggctgcaaggggc

SEQ ID NO: 7389 - DNA, 20 bp, Homo Sapiens
gcctctggctgcaaggggcg

SEQ ID NO: 7390 - DNA, 20 bp, Homo Sapiens
cctctggctgcaaggggcgc

SEQ ID NO: 7391 - DNA, 20 bp, Homo Sapiens
ctctggctgcaaggggcgct

SEQ ID NO: 7392 - DNA, 20 bp, Homo Sapiens
tctggctgcaaggggcgctg

SEQ ID NO: 7393 - DNA, 20 bp, Homo Sapiens
ctggctgcaaggggcgctgg

SEQ ID NO: 7394 - DNA, 20 bp, Homo Sapiens
tggctgcaaggggcgctggg

SEQ ID NO: 7395 - DNA, 20 bp, Homo Sapiens
ggctgcaaggggcgctgggc

SEQ ID NO: 7396 - DNA, 20 bp, Homo Sapiens
gctgcaaggggcgctgggct

SEQ ID NO: 7397 - DNA, 20 bp, Homo Sapiens
ctgcaaggggcgctgggctt

SEQ ID NO: 7398 - DNA, 20 bp, Homo Sapiens
tgcaaggggcgctgggcttc

SEQ ID NO: 7399 - DNA, 20 bp, Homo Sapiens
gcaaggggcgctgggcttcg

SEQ ID NO: 7400 - DNA, 20 bp, Homo Sapiens
caaggggcgctgggcttcgc

SEQ ID NO: 7401 - DNA, 20 bp, Homo Sapiens
aaggggcgctgggcttcgca

SEQ ID NO: 7402 - DNA, 20 bp, Homo Sapiens
aggggcgctgggcttcgcag

SEQ ID NO: 7403 - DNA, 20 bp, Homo Sapiens
ggggcgctgggcttcgcagg

SEQ ID NO: 7404 - DNA, 20 bp, Homo Sapiens
gggcgctgggcttcgcaggc

SEQ ID NO: 7405 - DNA, 20 bp, Homo Sapiens
ggcgctgggcttcgcaggca

SEQ ID NO: 7406 - DNA, 20 bp, Homo Sapiens
gcgctgggcttcgcaggcag

SEQ ID NO: 7407 - DNA, 20 bp, Homo Sapiens
cgctgggcttcgcaggcagg

SEQ ID NO: 7408 - DNA, 20 bp, Homo Sapiens
gctgggcttcgcaggcaggc

SEQ ID NO: 7409 - DNA, 20 bp, Homo Sapiens
ctgggcttcgcaggcaggcc

SEQ ID NO: 7410 - DNA, 20 bp, Homo Sapiens
tgggcttcgcaggcaggcca

SEQ ID NO: 7411 - DNA, 20 bp, Homo Sapiens
gggcttcgcaggcaggccag

SEQ ID NO: 7412 - DNA, 20 bp, Homo Sapiens
ggcttcgcaggcaggccagc

SEQ ID NO: 7413 - DNA, 20 bp, Homo Sapiens
gcttcgcaggcaggccagcc

SEQ ID NO: 7414 - DNA, 20 bp, Homo Sapiens
cttcgcaggcaggccagccg

SEQ ID NO: 7415 - DNA, 20 bp, Homo Sapiens
ttcgcaggcaggccagccgg

SEQ ID NO: 7416 - DNA, 20 bp, Homo Sapiens
tcgcaggcaggccagccggg

SEQ ID NO: 7417 - DNA, 20 bp, Homo Sapiens
cgcaggcaggccagccgggc

SEQ ID NO: 7418 - DNA, 20 bp, Homo Sapiens
gcaggcaggccagccgggct

SEQ ID NO: 7419 - DNA, 20 bp, Homo Sapiens
caggcaggccagccgggctc

SEQ ID NO: 7420 - DNA, 20 bp, Homo Sapiens
aggcaggccagccgggctcc

SEQ ID NO: 7421 - DNA, 20 bp, Homo Sapiens
ggcaggccagccgggctccc

SEQ ID NO: 7422 - DNA, 20 bp, Homo Sapiens
gcaggccagccgggctcccc

SEQ ID NO: 7423 - DNA, 20 bp, Homo Sapiens
caggccagccgggctccccg

SEQ ID NO: 7424 - DNA, 20 bp, Homo Sapiens
aggccagccgggctccccgc

SEQ ID NO: 7425 - DNA, 20 bp, Homo Sapiens
ggccagccgggctccccgcc

SEQ ID NO: 7426 - DNA, 20 bp, Homo Sapiens
gccagccgggctccccgcca

SEQ ID NO: 7427 - DNA, 20 bp, Homo Sapiens
ccagccgggctccccgccat

SEQ ID NO: 7428 - DNA, 20 bp, Homo Sapiens
cagccgggctccccgccatg

SEQ ID NO: 7429 - DNA, 20 bp, Homo Sapiens
agccgggctccccgccatgg

SEQ ID NO: 7430 - DNA, 20 bp, Homo Sapiens
gccgggctccccgccatggg

SEQ ID NO: 7431 - DNA, 20 bp, Homo Sapiens
ccgggctccccgccatgggc

SEQ ID NO: 7432 - DNA, 20 bp, Homo Sapiens
cgggctccccgccatgggcc

SEQ ID NO: 7433 - DNA, 20 bp, Homo Sapiens
gggctccccgccatgggcca

SEQ ID NO: 7434 - DNA, 20 bp, Homo Sapiens
ggctccccgccatgggccag

SEQ ID NO: 7435 - DNA, 20 bp, Homo Sapiens
gctccccgccatgggccagg

SEQ ID NO: 7436 - DNA, 20 bp, Homo Sapiens
ctccccgccatgggccagga

SEQ ID NO: 7437 - DNA, 20 bp, Homo Sapiens
tccccgccatgggccaggat

SEQ ID NO: 7438 - DNA, 20 bp, Homo Sapiens
ccccgccatgggccaggatc

SEQ ID NO: 7439 - DNA, 20 bp, Homo Sapiens
cccgccatgggccaggatcc

SEQ ID NO: 7440 - DNA, 20 bp, Homo Sapiens
ccgccatgggccaggatccc

SEQ ID NO: 7441 - DNA, 20 bp, Homo Sapiens
cgccatgggccaggatcccc

SEQ ID NO: 7442 - DNA, 20 bp, Homo Sapiens
gccatgggccaggatcccct

SEQ ID NO: 7443 - DNA, 20 bp, Homo Sapiens
ccatgggccaggatcccctc

SEQ ID NO: 7444 - DNA, 20 bp, Homo Sapiens
catgggccaggatcccctcc

SEQ ID NO: 7445 - DNA, 20 bp, Homo Sapiens
atgggccaggatcccctccg

SEQ ID NO: 7446 - DNA, 20 bp, Homo Sapiens
tgggccaggatcccctccga

SEQ ID NO: 7447 - DNA, 20 bp, Homo Sapiens
gggccaggatcccctccgag

SEQ ID NO: 7448 - DNA, 20 bp, Homo Sapiens
ggccaggatcccctccgagc

SEQ ID NO: 7449 - DNA, 20 bp, Homo Sapiens
gccaggatcccctccgagcc

SEQ ID NO: 7450 - DNA, 20 bp, Homo Sapiens
ccaggatcccctccgagccc

SEQ ID NO: 7451 - DNA, 20 bp, Homo Sapiens
caggatcccctccgagccct

SEQ ID NO: 7452 - DNA, 20 bp, Homo Sapiens
aggatcccctccgagccctg

SEQ ID NO: 7453 - DNA, 20 bp, Homo Sapiens
ggatcccctccgagccctgt

SEQ ID NO: 7454 - DNA, 20 bp, Homo Sapiens
gatcccctccgagccctgtt

SEQ ID NO: 7455 - DNA, 20 bp, Homo Sapiens
atcccctccgagccctgttt

SEQ ID NO: 7456 - DNA, 20 bp, Homo Sapiens
tcccctccgagccctgtttg

SEQ ID NO: 7457 - DNA, 20 bp, Homo Sapiens
cccctccgagccctgtttgc

SEQ ID NO: 7458 - DNA, 20 bp, Homo Sapiens
ccctccgagccctgtttgcc

SEQ ID NO: 7459 - DNA, 20 bp, Homo Sapiens
cctccgagccctgtttgccg

SEQ ID NO: 7460 - DNA, 20 bp, Homo Sapiens
ctccgagccctgtttgccgc

SEQ ID NO: 7461 - DNA, 20 bp, Homo Sapiens
tccgagccctgtttgccgcc

SEQ ID NO: 7462 - DNA, 20 bp, Homo Sapiens
ccgagccctgtttgccgccc

SEQ ID NO: 7463 - DNA, 20 bp, Homo Sapiens
cgagccctgtttgccgccca

SEQ ID NO: 7464 - DNA, 20 bp, Homo Sapiens
gagccctgtttgccgcccag

SEQ ID NO: 7465 - DNA, 20 bp, Homo Sapiens
agccctgtttgccgcccagg

SEQ ID NO: 7466 - DNA, 20 bp, Homo Sapiens
gccctgtttgccgcccagga

SEQ ID NO: 7467 - DNA, 20 bp, Homo Sapiens
ccctgtttgccgcccaggag

SEQ ID NO: 7468 - DNA, 20 bp, Homo Sapiens
cctgtttgccgcccaggaga

SEQ ID NO: 7469 - DNA, 20 bp, Homo Sapiens
ctgtttgccgcccaggagaa

SEQ ID NO: 7470 - DNA, 20 bp, Homo Sapiens
tgtttgccgcccaggagaag

SEQ ID NO: 7471 - DNA, 20 bp, Homo Sapiens
gtttgccgcccaggagaagg

SEQ ID NO: 7472 - DNA, 20 bp, Homo Sapiens
tttgccgcccaggagaaggg

SEQ ID NO: 7473 - DNA, 20 bp, Homo Sapiens
ttgccgcccaggagaagggg

SEQ ID NO: 7474 - DNA, 20 bp, Homo Sapiens
tgccgcccaggagaaggggt

SEQ ID NO: 7475 - DNA, 20 bp, Homo Sapiens
gccgcccaggagaaggggtt

SEQ ID NO: 7476 - DNA, 20 bp, Homo Sapiens
ccgcccaggagaaggggttc

SEQ ID NO: 7477 - DNA, 20 bp, Homo Sapiens
cgcccaggagaaggggttcc

SEQ ID NO: 7478 - DNA, 20 bp, Homo Sapiens
gcccaggagaaggggttccc

SEQ ID NO: 7479 - DNA, 20 bp, Homo Sapiens
cccaggagaaggggttcccc

SEQ ID NO: 7480 - DNA, 20 bp, Homo Sapiens
ccaggagaaggggttccccg

SEQ ID NO: 7481 - DNA, 20 bp, Homo Sapiens
caggagaaggggttccccgg

SEQ ID NO: 7482 - DNA, 20 bp, Homo Sapiens
aggagaaggggttccccggg

SEQ ID NO: 7483 - DNA, 20 bp, Homo Sapiens
ggagaaggggttccccgggg

SEQ ID NO: 7484 - DNA, 20 bp, Homo Sapiens
gagaaggggttccccgggga

SEQ ID NO: 7485 - DNA, 20 bp, Homo Sapiens
agaaggggttccccggggac

SEQ ID NO: 7486 - DNA, 20 bp, Homo Sapiens
gaaggggttccccggggaca

SEQ ID NO: 7487 - DNA, 20 bp, Homo Sapiens
aaggggttccccggggacag

SEQ ID NO: 7488 - DNA, 20 bp, Homo Sapiens
aggggttccccggggacagt

SEQ ID NO: 7489 - DNA, 20 bp, Homo Sapiens
ggggttccccggggacagtg

SEQ ID NO: 7490 - DNA, 20 bp, Homo Sapiens
gggttccccggggacagtgg

SEQ ID NO: 7491 - DNA, 20 bp, Homo Sapiens
ggttccccggggacagtggg

SEQ ID NO: 7492 - DNA, 20 bp, Homo Sapiens
gttccccggggacagtgggc

SEQ ID NO: 7493 - DNA, 20 bp, Homo Sapiens
ttccccggggacagtgggct

SEQ ID NO: 7494 - DNA, 20 bp, Homo Sapiens
tccccggggacagtgggctc

SEQ ID NO: 7495 - DNA, 20 bp, Homo Sapiens
ccccggggacagtgggctca

SEQ ID NO: 7496 - DNA, 20 bp, Homo Sapiens
cccggggacagtgggctcag

SEQ ID NO: 7497 - DNA, 20 bp, Homo Sapiens
ccggggacagtgggctcagg

SEQ ID NO: 7498 - DNA, 20 bp, Homo Sapiens
cggggacagtgggctcaggg

SEQ ID NO: 7499 - DNA, 20 bp, Homo Sapiens
ggggacagtgggctcagggt

SEQ ID NO: 7500 - DNA, 20 bp, Homo Sapiens
gggacagtgggctcagggtg

SEQ ID NO: 7501 - DNA, 20 bp, Homo Sapiens
ggacagtgggctcagggtgt

SEQ ID NO: 7502 - DNA, 20 bp, Homo Sapiens
gacagtgggctcagggtgtg

SEQ ID NO: 7503 - DNA, 20 bp, Homo Sapiens
acagtgggctcagggtgtgc

SEQ ID NO: 7504 - DNA, 20 bp, Homo Sapiens
cagtgggctcagggtgtgcg

SEQ ID NO: 7505 - DNA, 20 bp, Homo Sapiens
agtgggctcagggtgtgcgc

SEQ ID NO: 7506 - DNA, 20 bp, Homo Sapiens
gtgggctcagggtgtgcgca

SEQ ID NO: 7507 - DNA, 20 bp, Homo Sapiens
tgggctcagggtgtgcgcag

SEQ ID NO: 7508 - DNA, 20 bp, Homo Sapiens
gggctcagggtgtgcgcagc

SEQ ID NO: 7509 - DNA, 20 bp, Homo Sapiens
ggctcagggtgtgcgcagcc

SEQ ID NO: 7510 - DNA, 20 bp, Homo Sapiens
gctcagggtgtgcgcagcca

SEQ ID NO: 7511 - DNA, 20 bp, Homo Sapiens
ctcagggtgtgcgcagccac

SEQ ID NO: 7512 - DNA, 20 bp, Homo Sapiens
tcagggtgtgcgcagccacc

SEQ ID NO: 7513 - DNA, 20 bp, Homo Sapiens
cagggtgtgcgcagccacca

SEQ ID NO: 7514 - DNA, 20 bp, Homo Sapiens
agggtgtgcgcagccaccat

SEQ ID NO: 7515 - DNA, 20 bp, Homo Sapiens
gggtgtgcgcagccaccatg

SEQ ID NO: 7516 - DNA, 20 bp, Homo Sapiens
ggtgtgcgcagccaccatgc

SEQ ID NO: 7517 - DNA, 20 bp, Homo Sapiens
gtgtgcgcagccaccatgct

SEQ ID NO: 7518 - DNA, 20 bp, Homo Sapiens
tgtgcgcagccaccatgctg

SEQ ID NO: 7519 - DNA, 20 bp, Homo Sapiens
gtgcgcagccaccatgctgt

SEQ ID NO: 7520 - DNA, 20 bp, Homo Sapiens
tgcgcagccaccatgctgtg

SEQ ID NO: 7521 - DNA, 20 bp, Homo Sapiens
gcgcagccaccatgctgtgg

SEQ ID NO: 7522 - DNA, 20 bp, Homo Sapiens
cgcagccaccatgctgtggt

SEQ ID NO: 7523 - DNA, 20 bp, Homo Sapiens
gcagccaccatgctgtggtg

SEQ ID NO: 7524 - DNA, 20 bp, Homo Sapiens
cagccaccatgctgtggtgt

SEQ ID NO: 7525 - DNA, 20 bp, Homo Sapiens
agccaccatgctgtggtgtc

SEQ ID NO: 7526 - DNA, 20 bp, Homo Sapiens
gccaccatgctgtggtgtca

SEQ ID NO: 7527 - DNA, 20 bp, Homo Sapiens
ccaccatgctgtggtgtcac

SEQ ID NO: 7528 - DNA, 20 bp, Homo Sapiens
caccatgctgtggtgtcacc

SEQ ID NO: 7529 - DNA, 20 bp, Homo Sapiens
accatgctgtggtgtcacct

SEQ ID NO: 7530 - DNA, 20 bp, Homo Sapiens
ccatgctgtggtgtcacctg

SEQ ID NO: 7531 - DNA, 20 bp, Homo Sapiens
catgctgtggtgtcacctgt

SEQ ID NO: 7532 - DNA, 20 bp, Homo Sapiens
atgctgtggtgtcacctgtg

SEQ ID NO: 7533 - DNA, 20 bp, Homo Sapiens
tgctgtggtgtcacctgtgg

SEQ ID NO: 7534 - DNA, 20 bp, Homo Sapiens
gctgtggtgtcacctgtgga

SEQ ID NO: 7535 - DNA, 20 bp, Homo Sapiens
ctgtggtgtcacctgtggac

SEQ ID NO: 7536 - DNA, 20 bp, Homo Sapiens
tgtggtgtcacctgtggacc

SEQ ID NO: 7537 - DNA, 20 bp, Homo Sapiens
gtggtgtcacctgtggaccc

SEQ ID NO: 7538 - DNA, 20 bp, Homo Sapiens
tggtgtcacctgtggaccca

SEQ ID NO: 7539 - DNA, 20 bp, Homo Sapiens
ggtgtcacctgtggacccag

SEQ ID NO: 7540 - DNA, 20 bp, Homo Sapiens
gtgtcacctgtggacccagg

SEQ ID NO: 7541 - DNA, 20 bp, Homo Sapiens
tgtcacctgtggacccaggc

SEQ ID NO: 7542 - DNA, 20 bp, Homo Sapiens
gtcacctgtggacccaggcg

SEQ ID NO: 7543 - DNA, 20 bp, Homo Sapiens
tcacctgtggacccaggcga

SEQ ID NO: 7544 - DNA, 20 bp, Homo Sapiens
cacctgtggacccaggcgag

SEQ ID NO: 7545 - DNA, 20 bp, Homo Sapiens
acctgtggacccaggcgagc

SEQ ID NO: 7546 - DNA, 20 bp, Homo Sapiens
cctgtggacccaggcgagct

SEQ ID NO: 7547 - DNA, 20 bp, Homo Sapiens
ctgtggacccaggcgagctg

SEQ ID NO: 7548 - DNA, 20 bp, Homo Sapiens
tgtggacccaggcgagctga

SEQ ID NO: 7549 - DNA, 20 bp, Homo Sapiens
gtggacccaggcgagctgat

SEQ ID NO: 7550 - DNA, 20 bp, Homo Sapiens
tggacccaggcgagctgatg

SEQ ID NO: 7551 - DNA, 20 bp, Homo Sapiens
ggacccaggcgagctgatgg

SEQ ID NO: 7552 - DNA, 20 bp, Homo Sapiens
gacccaggcgagctgatggc

SEQ ID NO: 7553 - DNA, 20 bp, Homo Sapiens
acccaggcgagctgatggcc

SEQ ID NO: 7554 - DNA, 20 bp, Homo Sapiens
cccaggcgagctgatggccg

SEQ ID NO: 7555 - DNA, 20 bp, Homo Sapiens
ccaggcgagctgatggccga

SEQ ID NO: 7556 - DNA, 20 bp, Homo Sapiens
caggcgagctgatggccgac

SEQ ID NO: 7557 - DNA, 20 bp, Homo Sapiens
aggcgagctgatggccgacc

SEQ ID NO: 7558 - DNA, 20 bp, Homo Sapiens
ggcgagctgatggccgaccg

SEQ ID NO: 7559 - DNA, 20 bp, Homo Sapiens
gcgagctgatggccgaccgc

SEQ ID NO: 7560 - DNA, 20 bp, Homo Sapiens
cgagctgatggccgaccgca

SEQ ID NO: 7561 - DNA, 20 bp, Homo Sapiens
gagctgatggccgaccgcag

SEQ ID NO: 7562 - DNA, 20 bp, Homo Sapiens
agctgatggccgaccgcaga

SEQ ID NO: 7563 - DNA, 20 bp, Homo Sapiens
gctgatggccgaccgcagaa

SEQ ID NO: 7564 - DNA, 20 bp, Homo Sapiens
ctgatggccgaccgcagaaa

SEQ ID NO: 7565 - DNA, 20 bp, Homo Sapiens
tgatggccgaccgcagaaac

SEQ ID NO: 7566 - DNA, 20 bp, Homo Sapiens
gatggccgaccgcagaaacg

SEQ ID NO: 7567 - DNA, 20 bp, Homo Sapiens
atggccgaccgcagaaacgc

SEQ ID NO: 7568 - DNA, 20 bp, Homo Sapiens
tggccgaccgcagaaacgca

SEQ ID NO: 7569 - DNA, 20 bp, Homo Sapiens
ggccgaccgcagaaacgcac

SEQ ID NO: 7570 - DNA, 20 bp, Homo Sapiens
gccgaccgcagaaacgcact

SEQ ID NO: 7571 - DNA, 20 bp, Homo Sapiens
ccgaccgcagaaacgcactt

SEQ ID NO: 7572 - DNA, 20 bp, Homo Sapiens
cgaccgcagaaacgcacttc

SEQ ID NO: 7573 - DNA, 20 bp, Homo Sapiens
gaccgcagaaacgcacttcc

SEQ ID NO: 7574 - DNA, 20 bp, Homo Sapiens
accgcagaaacgcacttcca

SEQ ID NO: 7575 - DNA, 20 bp, Homo Sapiens
ccgcagaaacgcacttccaa

SEQ ID NO: 7576 - DNA, 20 bp, Homo Sapiens
cgcagaaacgcacttccaag

SEQ ID NO: 7577 - DNA, 20 bp, Homo Sapiens
gcagaaacgcacttccaagg

SEQ ID NO: 7578 - DNA, 20 bp, Homo Sapiens
cagaaacgcacttccaaggc

SEQ ID NO: 7579 - DNA, 20 bp, Homo Sapiens
agaaacgcacttccaaggcc

SEQ ID NO: 7580 - DNA, 20 bp, Homo Sapiens
gaaacgcacttccaaggcca

SEQ ID NO: 7581 - DNA, 20 bp, Homo Sapiens
aaacgcacttccaaggccag

SEQ ID NO: 7582 - DNA, 20 bp, Homo Sapiens
aacgcacttccaaggccagg

SEQ ID NO: 7583 - DNA, 20 bp, Homo Sapiens
acgcacttccaaggccaggt

SEQ ID NO: 7584 - DNA, 20 bp, Homo Sapiens
cgcacttccaaggccaggtc

SEQ ID NO: 7585 - DNA, 20 bp, Homo Sapiens
gcacttccaaggccaggtcg

SEQ ID NO: 7586 - DNA, 20 bp, Homo Sapiens
cacttccaaggccaggtcgg

SEQ ID NO: 7587 - DNA, 20 bp, Homo Sapiens
acttccaaggccaggtcggc

SEQ ID NO: 7588 - DNA, 20 bp, Homo Sapiens
cttccaaggccaggtcggcc

SEQ ID NO: 7589 - DNA, 20 bp, Homo Sapiens
ttccaaggccaggtcggccc

SEQ ID NO: 7590 - DNA, 20 bp, Homo Sapiens
tccaaggccaggtcggccca

SEQ ID NO: 7591 - DNA, 20 bp, Homo Sapiens
ccaaggccaggtcggcccat

SEQ ID NO: 7592 - DNA, 20 bp, Homo Sapiens
caaggccaggtcggcccatc

SEQ ID NO: 7593 - DNA, 20 bp, Homo Sapiens
aaggccaggtcggcccatcc

SEQ ID NO: 7594 - DNA, 20 bp, Homo Sapiens
aggccaggtcggcccatcca

SEQ ID NO: 7595 - DNA, 20 bp, Homo Sapiens
ggccaggtcggcccatccag

SEQ ID NO: 7596 - DNA, 20 bp, Homo Sapiens
gccaggtcggcccatccaga

SEQ ID NO: 7597 - DNA, 20 bp, Homo Sapiens
ccaggtcggcccatccagat

SEQ ID NO: 7598 - DNA, 20 bp, Homo Sapiens
caggtcggcccatccagatg

SEQ ID NO: 7599 - DNA, 20 bp, Homo Sapiens
aggtcggcccatccagatga

SEQ ID NO: 7600 - DNA, 20 bp, Homo Sapiens
ggtcggcccatccagatgat

SEQ ID NO: 7601 - DNA, 20 bp, Homo Sapiens
gtcggcccatccagatgatg

SEQ ID NO: 7602 - DNA, 20 bp, Homo Sapiens
tcggcccatccagatgatgc

SEQ ID NO: 7603 - DNA, 20 bp, Homo Sapiens
cggcccatccagatgatgca

SEQ ID NO: 7604 - DNA, 20 bp, Homo Sapiens
ggcccatccagatgatgcag

SEQ ID NO: 7605 - DNA, 20 bp, Homo Sapiens
gcccatccagatgatgcagg

SEQ ID NO: 7606 - DNA, 20 bp, Homo Sapiens
cccatccagatgatgcagga

SEQ ID NO: 7607 - DNA, 20 bp, Homo Sapiens
ccatccagatgatgcaggaa

SEQ ID NO: 7608 - DNA, 20 bp, Homo Sapiens
catccagatgatgcaggaac

SEQ ID NO: 7609 - DNA, 20 bp, Homo Sapiens
atccagatgatgcaggaaca

SEQ ID NO: 7610 - DNA, 20 bp, Homo Sapiens
tccagatgatgcaggaacac

SEQ ID NO: 7611 - DNA, 20 bp, Homo Sapiens
ccagatgatgcaggaacaca

SEQ ID NO: 7612 - DNA, 20 bp, Homo Sapiens
cagatgatgcaggaacacag

SEQ ID NO: 7613 - DNA, 20 bp, Homo Sapiens
agatgatgcaggaacacagc

SEQ ID NO: 7614 - DNA, 20 bp, Homo Sapiens
gatgatgcaggaacacagct

SEQ ID NO: 7615 - DNA, 20 bp, Homo Sapiens
atgatgcaggaacacagctt

SEQ ID NO: 7616 - DNA, 20 bp, Homo Sapiens
tgatgcaggaacacagcttg

SEQ ID NO: 7617 - DNA, 20 bp, Homo Sapiens
gatgcaggaacacagcttgc

SEQ ID NO: 7618 - DNA, 20 bp, Homo Sapiens
atgcaggaacacagcttgct

SEQ ID NO: 7619 - DNA, 20 bp, Homo Sapiens
tgcaggaacacagcttgcta

SEQ ID NO: 7620 - DNA, 20 bp, Homo Sapiens
gcaggaacacagcttgctaa

SEQ ID NO: 7621 - DNA, 20 bp, Homo Sapiens
caggaacacagcttgctaaa

SEQ ID NO: 7622 - DNA, 20 bp, Homo Sapiens
aggaacacagcttgctaaaa

SEQ ID NO: 7623 - DNA, 20 bp, Homo Sapiens
ggaacacagcttgctaaaaa

SEQ ID NO: 7624 - DNA, 20 bp, Homo Sapiens
gaacacagcttgctaaaaac

SEQ ID NO: 7625 - DNA, 20 bp, Homo Sapiens
aacacagcttgctaaaaaca

SEQ ID NO: 7626 - DNA, 20 bp, Homo Sapiens
acacagcttgctaaaaacac

SEQ ID NO: 7627 - DNA, 20 bp, Homo Sapiens
cacagcttgctaaaaacacg

SEQ ID NO: 7628 - DNA, 20 bp, Homo Sapiens
acagcttgctaaaaacacgg

SEQ ID NO: 7629 - DNA, 20 bp, Homo Sapiens
cagcttgctaaaaacacggc

SEQ ID NO: 7630 - DNA, 20 bp, Homo Sapiens
agcttgctaaaaacacggcc

SEQ ID NO: 7631 - DNA, 20 bp, Homo Sapiens
gcttgctaaaaacacggccg

SEQ ID NO: 7632 - DNA, 20 bp, Homo Sapiens
cttgctaaaaacacggccgg

SEQ ID NO: 7633 - DNA, 20 bp, Homo Sapiens
ttgctaaaaacacggccggc

SEQ ID NO: 7634 - DNA, 20 bp, Homo Sapiens
tgctaaaaacacggccggcc

SEQ ID NO: 7635 - DNA, 20 bp, Homo Sapiens
gctaaaaacacggccggcct

SEQ ID NO: 7636 - DNA, 20 bp, Homo Sapiens
ctaaaaacacggccggcctg

SEQ ID NO: 7637 - DNA, 20 bp, Homo Sapiens
taaaaacacggccggcctgt

SEQ ID NO: 7638 - DNA, 20 bp, Homo Sapiens
aaaaacacggccggcctgtt

SEQ ID NO: 7639 - DNA, 20 bp, Homo Sapiens
aaaacacggccggcctgttc

SEQ ID NO: 7640 - DNA, 20 bp, Homo Sapiens
aaacacggccggcctgttcc

SEQ ID NO: 7641 - DNA, 20 bp, Homo Sapiens
aacacggccggcctgttccc

SEQ ID NO: 7642 - DNA, 20 bp, Homo Sapiens
acacggccggcctgttcccg

SEQ ID NO: 7643 - DNA, 20 bp, Homo Sapiens
cacggccggcctgttcccgt

SEQ ID NO: 7644 - DNA, 20 bp, Homo Sapiens
acggccggcctgttcccgtc

SEQ ID NO: 7645 - DNA, 20 bp, Homo Sapiens
cggccggcctgttcccgtcg

SEQ ID NO: 7646 - DNA, 20 bp, Homo Sapiens
ggccggcctgttcccgtcgg

SEQ ID NO: 7647 - DNA, 20 bp, Homo Sapiens
gccggcctgttcccgtcgga

SEQ ID NO: 7648 - DNA, 20 bp, Homo Sapiens
ccggcctgttcccgtcggag

SEQ ID NO: 7649 - DNA, 20 bp, Homo Sapiens
cggcctgttcccgtcggagc

SEQ ID NO: 7650 - DNA, 20 bp, Homo Sapiens
ggcctgttcccgtcggagcc

SEQ ID NO: 7651 - DNA, 20 bp, Homo Sapiens
gcctgttcccgtcggagcca

SEQ ID NO: 7652 - DNA, 20 bp, Homo Sapiens
cctgttcccgtcggagccag

SEQ ID NO: 7653 - DNA, 20 bp, Homo Sapiens
ctgttcccgtcggagccagt

SEQ ID NO: 7654 - DNA, 20 bp, Homo Sapiens
tgttcccgtcggagccagtc

SEQ ID NO: 7655 - DNA, 20 bp, Homo Sapiens
gttcccgtcggagccagtcg

SEQ ID NO: 7656 - DNA, 20 bp, Homo Sapiens
ttcccgtcggagccagtcga

SEQ ID NO: 7657 - DNA, 20 bp, Homo Sapiens
tcccgtcggagccagtcgaa

SEQ ID NO: 7658 - DNA, 20 bp, Homo Sapiens
cccgtcggagccagtcgaag

SEQ ID NO: 7659 - DNA, 20 bp, Homo Sapiens
ccgtcggagccagtcgaagt

SEQ ID NO: 7660 - DNA, 20 bp, Homo Sapiens
cgtcggagccagtcgaagtt

SEQ ID NO: 7661 - DNA, 20 bp, Homo Sapiens
gtcggagccagtcgaagttc

SEQ ID NO: 7662 - DNA, 20 bp, Homo Sapiens
tcggagccagtcgaagttcc

SEQ ID NO: 7663 - DNA, 20 bp, Homo Sapiens
cggagccagtcgaagttccc

SEQ ID NO: 7664 - DNA, 20 bp, Homo Sapiens
ggagccagtcgaagttccct

SEQ ID NO: 7665 - DNA, 20 bp, Homo Sapiens
gagccagtcgaagttccctg

SEQ ID NO: 7666 - DNA, 20 bp, Homo Sapiens
agccagtcgaagttccctga

SEQ ID NO: 7667 - DNA, 20 bp, Homo Sapiens
gccagtcgaagttccctgaa

SEQ ID NO: 7668 - DNA, 20 bp, Homo Sapiens
ccagtcgaagttccctgaac

SEQ ID NO: 7669 - DNA, 20 bp, Homo Sapiens
cagtcgaagttccctgaaca

SEQ ID NO: 7670 - DNA, 20 bp, Homo Sapiens
agtcgaagttccctgaacag

SEQ ID NO: 7671 - DNA, 20 bp, Homo Sapiens
gtcgaagttccctgaacagg

SEQ ID NO: 7672 - DNA, 20 bp, Homo Sapiens
tcgaagttccctgaacaggc

SEQ ID NO: 7673 - DNA, 20 bp, Homo Sapiens
cgaagttccctgaacaggcc

SEQ ID NO: 7674 - DNA, 20 bp, Homo Sapiens
gaagttccctgaacaggccg

SEQ ID NO: 7675 - DNA, 20 bp, Homo Sapiens
aagttccctgaacaggccgc

SEQ ID NO: 7676 - DNA, 20 bp, Homo Sapiens
agttccctgaacaggccgct

SEQ ID NO: 7677 - DNA, 20 bp, Homo Sapiens
gttccctgaacaggccgctg

SEQ ID NO: 7678 - DNA, 20 bp, Homo Sapiens
ttccctgaacaggccgctgt

SEQ ID NO: 7679 - DNA, 20 bp, Homo Sapiens
tccctgaacaggccgctgtt

SEQ ID NO: 7680 - DNA, 20 bp, Homo Sapiens
ccctgaacaggccgctgttt

SEQ ID NO: 7681 - DNA, 20 bp, Homo Sapiens
cctgaacaggccgctgtttc

SEQ ID NO: 7682 - DNA, 20 bp, Homo Sapiens
ctgaacaggccgctgtttcc

SEQ ID NO: 7683 - DNA, 20 bp, Homo Sapiens
tgaacaggccgctgtttccg

SEQ ID NO: 7684 - DNA, 20 bp, Homo Sapiens
gaacaggccgctgtttccga

SEQ ID NO: 7685 - DNA, 20 bp, Homo Sapiens
aacaggccgctgtttccgaa

SEQ ID NO: 7686 - DNA, 20 bp, Homo Sapiens
acaggccgctgtttccgaag

SEQ ID NO: 7687 - DNA, 20 bp, Homo Sapiens
caggccgctgtttccgaagc

SEQ ID NO: 7688 - DNA, 20 bp, Homo Sapiens
aggccgctgtttccgaagct

SEQ ID NO: 7689 - DNA, 20 bp, Homo Sapiens
ggccgctgtttccgaagctt

SEQ ID NO: 7690 - DNA, 20 bp, Homo Sapiens
gccgctgtttccgaagcttt

SEQ ID NO: 7691 - DNA, 20 bp, Homo Sapiens
ccgctgtttccgaagcttta

SEQ ID NO: 7692 - DNA, 20 bp, Homo Sapiens
cgctgtttccgaagctttaa

SEQ ID NO: 7693 - DNA, 20 bp, Homo Sapiens
gctgtttccgaagctttaaa

SEQ ID NO: 7694 - DNA, 20 bp, Homo Sapiens
ctgtttccgaagctttaaac

SEQ ID NO: 7695 - DNA, 20 bp, Homo Sapiens
tgtttccgaagctttaaacc

SEQ ID NO: 7696 - DNA, 20 bp, Homo Sapiens
gtttccgaagctttaaaccc

SEQ ID NO: 7697 - DNA, 20 bp, Homo Sapiens
tttccgaagctttaaaccct

SEQ ID NO: 7698 - DNA, 20 bp, Homo Sapiens
ttccgaagctttaaaccctg

SEQ ID NO: 7699 - DNA, 20 bp, Homo Sapiens
tccgaagctttaaaccctgt

SEQ ID NO: 7700 - DNA, 20 bp, Homo Sapiens
ccgaagctttaaaccctgtg

SEQ ID NO: 7701 - DNA, 20 bp, Homo Sapiens
cgaagctttaaaccctgtgt

SEQ ID NO: 7702 - DNA, 20 bp, Homo Sapiens
gaagctttaaaccctgtgtt

SEQ ID NO: 7703 - DNA, 20 bp, Homo Sapiens
aagctttaaaccctgtgttt

SEQ ID NO: 7704 - DNA, 20 bp, Homo Sapiens
agctttaaaccctgtgtttc

SEQ ID NO: 7705 - DNA, 20 bp, Homo Sapiens
gctttaaaccctgtgtttcc

SEQ ID NO: 7706 - DNA, 20 bp, Homo Sapiens
ctttaaaccctgtgtttcca

SEQ ID NO: 7707 - DNA, 20 bp, Homo Sapiens
tttaaaccctgtgtttccac

SEQ ID NO: 7708 - DNA, 20 bp, Homo Sapiens
ttaaaccctgtgtttccacc

SEQ ID NO: 7709 - DNA, 20 bp, Homo Sapiens
taaaccctgtgtttccacca

SEQ ID NO: 7710 - DNA, 20 bp, Homo Sapiens
aaaccctgtgtttccaccaa

SEQ ID NO: 7711 - DNA, 20 bp, Homo Sapiens
aaccctgtgtttccaccaag

SEQ ID NO: 7712 - DNA, 20 bp, Homo Sapiens
accctgtgtttccaccaagc

SEQ ID NO: 7713 - DNA, 20 bp, Homo Sapiens
ccctgtgtttccaccaagct

SEQ ID NO: 7714 - DNA, 20 bp, Homo Sapiens
cctgtgtttccaccaagctg

SEQ ID NO: 7715 - DNA, 20 bp, Homo Sapiens
ctgtgtttccaccaagctga

SEQ ID NO: 7716 - DNA, 20 bp, Homo Sapiens
tgtgtttccaccaagctgag

SEQ ID NO: 7717 - DNA, 20 bp, Homo Sapiens
gtgtttccaccaagctgagt

SEQ ID NO: 7718 - DNA, 20 bp, Homo Sapiens
tgtttccaccaagctgagtc

SEQ ID NO: 7719 - DNA, 20 bp, Homo Sapiens
gtttccaccaagctgagtcc

SEQ ID NO: 7720 - DNA, 20 bp, Homo Sapiens
tttccaccaagctgagtcct

SEQ ID NO: 7721 - DNA, 20 bp, Homo Sapiens
ttccaccaagctgagtcctg

SEQ ID NO: 7722 - DNA, 20 bp, Homo Sapiens
tccaccaagctgagtcctga

SEQ ID NO: 7723 - DNA, 20 bp, Homo Sapiens
ccaccaagctgagtcctgag

SEQ ID NO: 7724 - DNA, 20 bp, Homo Sapiens
caccaagctgagtcctgaga

SEQ ID NO: 7725 - DNA, 20 bp, Homo Sapiens
accaagctgagtcctgagaa

SEQ ID NO: 7726 - DNA, 20 bp, Homo Sapiens
ccaagctgagtcctgagaaa

SEQ ID NO: 7727 - DNA, 20 bp, Homo Sapiens
caagctgagtcctgagaaaa

SEQ ID NO: 7728 - DNA, 20 bp, Homo Sapiens
aagctgagtcctgagaaaac

SEQ ID NO: 7729 - DNA, 20 bp, Homo Sapiens
agctgagtcctgagaaaacc

SEQ ID NO: 7730 - DNA, 20 bp, Homo Sapiens
gctgagtcctgagaaaaccg

SEQ ID NO: 7731 - DNA, 20 bp, Homo Sapiens
ctgagtcctgagaaaaccga

SEQ ID NO: 7732 - DNA, 20 bp, Homo Sapiens
tgagtcctgagaaaaccgac

SEQ ID NO: 7733 - DNA, 20 bp, Homo Sapiens
gagtcctgagaaaaccgacg

SEQ ID NO: 7734 - DNA, 20 bp, Homo Sapiens
agtcctgagaaaaccgacgt

SEQ ID NO: 7735 - DNA, 20 bp, Homo Sapiens
gtcctgagaaaaccgacgtc

SEQ ID NO: 7736 - DNA, 20 bp, Homo Sapiens
tcctgagaaaaccgacgtct

SEQ ID NO: 7737 - DNA, 20 bp, Homo Sapiens
cctgagaaaaccgacgtctg

SEQ ID NO: 7738 - DNA, 20 bp, Homo Sapiens
ctgagaaaaccgacgtctgc

SEQ ID NO: 7739 - DNA, 20 bp, Homo Sapiens
tgagaaaaccgacgtctgcc

SEQ ID NO: 7740 - DNA, 20 bp, Homo Sapiens
gagaaaaccgacgtctgcct

SEQ ID NO: 7741 - DNA, 20 bp, Homo Sapiens
agaaaaccgacgtctgcctg

SEQ ID NO: 7742 - DNA, 20 bp, Homo Sapiens
gaaaaccgacgtctgcctgc

SEQ ID NO: 7743 - DNA, 20 bp, Homo Sapiens
aaaaccgacgtctgcctgca

SEQ ID NO: 7744 - DNA, 20 bp, Homo Sapiens
aaaccgacgtctgcctgcag

SEQ ID NO: 7745 - DNA, 20 bp, Homo Sapiens
aaccgacgtctgcctgcaga

SEQ ID NO: 7746 - DNA, 20 bp, Homo Sapiens
accgacgtctgcctgcagaa

SEQ ID NO: 7747 - DNA, 20 bp, Homo Sapiens
ccgacgtctgcctgcagaag

SEQ ID NO: 7748 - DNA, 20 bp, Homo Sapiens
cgacgtctgcctgcagaagg

SEQ ID NO: 7749 - DNA, 20 bp, Homo Sapiens
gacgtctgcctgcagaaggg

SEQ ID NO: 7750 - DNA, 20 bp, Homo Sapiens
acgtctgcctgcagaaggga

SEQ ID NO: 7751 - DNA, 20 bp, Homo Sapiens
cgtctgcctgcagaagggaa

SEQ ID NO: 7752 - DNA, 20 bp, Homo Sapiens
gtctgcctgcagaagggaaa

SEQ ID NO: 7753 - DNA, 20 bp, Homo Sapiens
tctgcctgcagaagggaaag

SEQ ID NO: 7754 - DNA, 20 bp, Homo Sapiens
ctgcctgcagaagggaaagg

SEQ ID NO: 7755 - DNA, 20 bp, Homo Sapiens
tgcctgcagaagggaaaggg

SEQ ID NO: 7756 - DNA, 20 bp, Homo Sapiens
gcctgcagaagggaaagggg

SEQ ID NO: 7757 - DNA, 20 bp, Homo Sapiens
cctgcagaagggaaaggggt

SEQ ID NO: 7758 - DNA, 20 bp, Homo Sapiens
ctgcagaagggaaaggggtg

SEQ ID NO: 7759 - DNA, 20 bp, Homo Sapiens
tgcagaagggaaaggggtgc

SEQ ID NO: 7760 - DNA, 20 bp, Homo Sapiens
gcagaagggaaaggggtgct

SEQ ID NO: 7761 - DNA, 20 bp, Homo Sapiens
cagaagggaaaggggtgctt

SEQ ID NO: 7762 - DNA, 20 bp, Homo Sapiens
agaagggaaaggggtgcttc

SEQ ID NO: 7763 - DNA, 20 bp, Homo Sapiens
gaagggaaaggggtgcttca

SEQ ID NO: 7764 - DNA, 20 bp, Homo Sapiens
aagggaaaggggtgcttcat

SEQ ID NO: 7765 - DNA, 20 bp, Homo Sapiens
agggaaaggggtgcttcatg

SEQ ID NO: 7766 - DNA, 20 bp, Homo Sapiens
gggaaaggggtgcttcatgt

SEQ ID NO: 7767 - DNA, 20 bp, Homo Sapiens
ggaaaggggtgcttcatgtt

SEQ ID NO: 7768 - DNA, 20 bp, Homo Sapiens
gaaaggggtgcttcatgttc

SEQ ID NO: 7769 - DNA, 20 bp, Homo Sapiens
aaaggggtgcttcatgttcc

SEQ ID NO: 7770 - DNA, 20 bp, Homo Sapiens
aaggggtgcttcatgttcct

SEQ ID NO: 7771 - DNA, 20 bp, Homo Sapiens
aggggtgcttcatgttcctc

SEQ ID NO: 7772 - DNA, 20 bp, Homo Sapiens
ggggtgcttcatgttcctct

SEQ ID NO: 7773 - DNA, 20 bp, Homo Sapiens
gggtgcttcatgttcctctc

SEQ ID NO: 7774 - DNA, 20 bp, Homo Sapiens
ggtgcttcatgttcctctct

SEQ ID NO: 7775 - DNA, 20 bp, Homo Sapiens
gtgcttcatgttcctctctc

SEQ ID NO: 7776 - DNA, 20 bp, Homo Sapiens
tgcttcatgttcctctctct

SEQ ID NO: 7777 - DNA, 20 bp, Homo Sapiens
gcttcatgttcctctctctc

SEQ ID NO: 7778 - DNA, 20 bp, Homo Sapiens
cttcatgttcctctctctcc

SEQ ID NO: 7779 - DNA, 20 bp, Homo Sapiens
ttcatgttcctctctctcct

SEQ ID NO: 7780 - DNA, 20 bp, Homo Sapiens
tcatgttcctctctctcctt

SEQ ID NO: 7781 - DNA, 20 bp, Homo Sapiens
catgttcctctctctccttc

SEQ ID NO: 7782 - DNA, 20 bp, Homo Sapiens
atgttcctctctctccttca

SEQ ID NO: 7783 - DNA, 20 bp, Homo Sapiens
tgttcctctctctccttcat

SEQ ID NO: 7784 - DNA, 20 bp, Homo Sapiens
gttcctctctctccttcatc

SEQ ID NO: 7785 - DNA, 20 bp, Homo Sapiens
ttcctctctctccttcatct

SEQ ID NO: 7786 - DNA, 20 bp, Homo Sapiens
tcctctctctccttcatctc

SEQ ID NO: 7787 - DNA, 20 bp, Homo Sapiens
cctctctctccttcatctcc

SEQ ID NO: 7788 - DNA, 20 bp, Homo Sapiens
ctctctctccttcatctccc

SEQ ID NO: 7789 - DNA, 20 bp, Homo Sapiens
tctctctccttcatctccct

SEQ ID NO: 7790 - DNA, 20 bp, Homo Sapiens
ggccctgggacctttgccta

SEQ ID NO: 7791 - DNA, 20 bp, Homo Sapiens
gccctgggacctttgcctat

SEQ ID NO: 7792 - DNA, 20 bp, Homo Sapiens
ccctgggacctttgcctatt

SEQ ID NO: 7793 - DNA, 20 bp, Homo Sapiens
cctgggacctttgcctattt

SEQ ID NO: 7794 - DNA, 20 bp, Homo Sapiens
ctgggacctttgcctatttt

SEQ ID NO: 7795 - DNA, 20 bp, Homo Sapiens
tgggacctttgcctattttc

SEQ ID NO: 7796 - DNA, 20 bp, Homo Sapiens
gggacctttgcctattttct

SEQ ID NO: 7797 - DNA, 20 bp, Homo Sapiens
ggacctttgcctattttctg

SEQ ID NO: 7798 - DNA, 20 bp, Homo Sapiens
gacctttgcctattttctga

SEQ ID NO: 7799 - DNA, 20 bp, Homo Sapiens
acctttgcctattttctgat

SEQ ID NO: 7800 - DNA, 20 bp, Homo Sapiens
cctttgcctattttctgatt

SEQ ID NO: 7801 - DNA, 20 bp, Homo Sapiens
ctttgcctattttctgattg

SEQ ID NO: 7802 - DNA, 20 bp, Homo Sapiens
tttgcctattttctgattga

SEQ ID NO: 7803 - DNA, 20 bp, Homo Sapiens
ttgcctattttctgattgat

SEQ ID NO: 7804 - DNA, 20 bp, Homo Sapiens
tgcctattttctgattgata

SEQ ID NO: 7805 - DNA, 20 bp, Homo Sapiens
gcctattttctgattgatag

SEQ ID NO: 7806 - DNA, 20 bp, Homo Sapiens
cctattttctgattgatagg

SEQ ID NO: 7807 - DNA, 20 bp, Homo Sapiens
ctattttctgattgataggc

SEQ ID NO: 7808 - DNA, 20 bp, Homo Sapiens
tattttctgattgataggct

SEQ ID NO: 7809 - DNA, 20 bp, Homo Sapiens
attttctgattgataggctt

SEQ ID NO: 7810 - DNA, 20 bp, Homo Sapiens
ttttctgattgataggcttt

SEQ ID NO: 7811 - DNA, 20 bp, Homo Sapiens
tttctgattgataggctttg

SEQ ID NO: 7812 - DNA, 20 bp, Homo Sapiens
ttctgattgataggctttgt

SEQ ID NO: 7813 - DNA, 20 bp, Homo Sapiens
tctgattgataggctttgtt

SEQ ID NO: 7814 - DNA, 20 bp, Homo Sapiens
ctgattgataggctttgttt

SEQ ID NO: 7815 - DNA, 20 bp, Homo Sapiens
tgattgataggctttgtttt

SEQ ID NO: 7816 - DNA, 20 bp, Homo Sapiens
gattgataggctttgttttg

SEQ ID NO: 7817 - DNA, 20 bp, Homo Sapiens
attgataggctttgttttgt

SEQ ID NO: 7818 - DNA, 20 bp, Homo Sapiens
ttgataggctttgttttgtc

SEQ ID NO: 7819 - DNA, 20 bp, Homo Sapiens
tgataggctttgttttgtct

SEQ ID NO: 7820 - DNA, 20 bp, Homo Sapiens
gataggctttgttttgtctt

SEQ ID NO: 7821 - DNA, 20 bp, Homo Sapiens
ataggctttgttttgtcttt

SEQ ID NO: 7822 - DNA, 20 bp, Homo Sapiens
taggctttgttttgtcttta

SEQ ID NO: 7823 - DNA, 20 bp, Homo Sapiens
aggctttgttttgtctttac

SEQ ID NO: 7824 - DNA, 20 bp, Homo Sapiens
ggctttgttttgtctttacc

SEQ ID NO: 7825 - DNA, 20 bp, Homo Sapiens
gctttgttttgtctttacct

SEQ ID NO: 7826 - DNA, 20 bp, Homo Sapiens
ctttgttttgtctttacctc

SEQ ID NO: 7827 - DNA, 20 bp, Homo Sapiens
tttgttttgtctttacctcc

SEQ ID NO: 7828 - DNA, 20 bp, Homo Sapiens
ttgttttgtctttacctcct

SEQ ID NO: 7829 - DNA, 20 bp, Homo Sapiens
tgttttgtctttacctcctt

SEQ ID NO: 7830 - DNA, 20 bp, Homo Sapiens
gttttgtctttacctccttc

SEQ ID NO: 7831 - DNA, 20 bp, Homo Sapiens
ttttgtctttacctccttct

SEQ ID NO: 7832 - DNA, 20 bp, Homo Sapiens
tttgtctttacctccttctt

SEQ ID NO: 7833 - DNA, 20 bp, Homo Sapiens
ttgtctttacctccttcttt

SEQ ID NO: 7834 - DNA, 20 bp, Homo Sapiens
tgtctttacctccttctttc

SEQ ID NO: 7835 - DNA, 20 bp, Homo Sapiens
gtctttacctccttctttct

SEQ ID NO: 7836 - DNA, 20 bp, Homo Sapiens
tctttacctccttctttctg

SEQ ID NO: 7837 - DNA, 20 bp, Homo Sapiens
ctttacctccttctttctgg

SEQ ID NO: 7838 - DNA, 20 bp, Homo Sapiens
tttacctccttctttctggg

SEQ ID NO: 7839 - DNA, 20 bp, Homo Sapiens
ttacctccttctttctgggg

SEQ ID NO: 7840 - DNA, 20 bp, Homo Sapiens
tacctccttctttctgggga

SEQ ID NO: 7841 - DNA, 20 bp, Homo Sapiens
acctccttctttctggggaa

SEQ ID NO: 7842 - DNA, 20 bp, Homo Sapiens
cctccttctttctggggaaa

SEQ ID NO: 7843 - DNA, 20 bp, Homo Sapiens
ctccttctttctggggaaaa

SEQ ID NO: 7844 - DNA, 20 bp, Homo Sapiens
tccttctttctggggaaaac

SEQ ID NO: 7845 - DNA, 20 bp, Homo Sapiens
ccttctttctggggaaaact

SEQ ID NO: 7846 - DNA, 20 bp, Homo Sapiens
cttctttctggggaaaactt

SEQ ID NO: 7847 - DNA, 20 bp, Homo Sapiens
ttctttctggggaaaacttc

SEQ ID NO: 7848 - DNA, 20 bp, Homo Sapiens
tctttctggggaaaacttca

SEQ ID NO: 7849 - DNA, 20 bp, Homo Sapiens
ctttctggggaaaacttcag

SEQ ID NO: 7850 - DNA, 20 bp, Homo Sapiens
tttctggggaaaacttcagt

SEQ ID NO: 7851 - DNA, 20 bp, Homo Sapiens
ttctggggaaaacttcagtt

SEQ ID NO: 7852 - DNA, 20 bp, Homo Sapiens
tctggggaaaacttcagttt

SEQ ID NO: 7853 - DNA, 20 bp, Homo Sapiens
ctggggaaaacttcagtttt

SEQ ID NO: 7854 - DNA, 20 bp, Homo Sapiens
tggggaaaacttcagtttta

SEQ ID NO: 7855 - DNA, 20 bp, Homo Sapiens
ggggaaaacttcagttttat

SEQ ID NO: 7856 - DNA, 20 bp, Homo Sapiens
gggaaaacttcagttttatc

SEQ ID NO: 7857 - DNA, 20 bp, Homo Sapiens
ggaaaacttcagttttatcg

SEQ ID NO: 7858 - DNA, 20 bp, Homo Sapiens
gaaaacttcagttttatcgc

SEQ ID NO: 7859 - DNA, 20 bp, Homo Sapiens
aaaacttcagttttatcgca

SEQ ID NO: 7860 - DNA, 20 bp, Homo Sapiens
aaacttcagttttatcgcac

SEQ ID NO: 7861 - DNA, 20 bp, Homo Sapiens
aacttcagttttatcgcacg

SEQ ID NO: 7862 - DNA, 20 bp, Homo Sapiens
acttcagttttatcgcacgt

SEQ ID NO: 7863 - DNA, 20 bp, Homo Sapiens
cttcagttttatcgcacgtt

SEQ ID NO: 7864 - DNA, 20 bp, Homo Sapiens
ttcagttttatcgcacgttc

SEQ ID NO: 7865 - DNA, 20 bp, Homo Sapiens
tcagttttatcgcacgttcc

SEQ ID NO: 7866 - DNA, 20 bp, Homo Sapiens
cagttttatcgcacgttccc

SEQ ID NO: 7867 - DNA, 20 bp, Homo Sapiens
agttttatcgcacgttcccc

SEQ ID NO: 7868 - DNA, 20 bp, Homo Sapiens
gttttatcgcacgttcccct

SEQ ID NO: 7869 - DNA, 20 bp, Homo Sapiens
ttttatcgcacgttcccctt

SEQ ID NO: 7870 - DNA, 20 bp, Homo Sapiens
tttatcgcacgttccccttt

SEQ ID NO: 7871 - DNA, 20 bp, Homo Sapiens
ttatcgcacgttcccctttt

SEQ ID NO: 7872 - DNA, 20 bp, Homo Sapiens
tatcgcacgttccccttttc

SEQ ID NO: 7873 - DNA, 20 bp, Homo Sapiens
atcgcacgttccccttttcc

SEQ ID NO: 7874 - DNA, 20 bp, Homo Sapiens
tcgcacgttccccttttcca

SEQ ID NO: 7875 - DNA, 20 bp, Homo Sapiens
cgcacgttccccttttccat

SEQ ID NO: 7876 - DNA, 20 bp, Homo Sapiens
gcacgttccccttttccata

SEQ ID NO: 7877 - DNA, 20 bp, Homo Sapiens
cacgttccccttttccatat

SEQ ID NO: 7878 - DNA, 20 bp, Homo Sapiens
acgttccccttttccatatc

SEQ ID NO: 7879 - DNA, 20 bp, Homo Sapiens
cgttccccttttccatatct

SEQ ID NO: 7880 - DNA, 20 bp, Homo Sapiens
gttccccttttccatatctt

SEQ ID NO: 7881 - DNA, 20 bp, Homo Sapiens
ttccccttttccatatcttc

SEQ ID NO: 7882 - DNA, 20 bp, Homo Sapiens
tccccttttccatatcttca

SEQ ID NO: 7883 - DNA, 20 bp, Homo Sapiens
ccccttttccatatcttcat

SEQ ID NO: 7884 - DNA, 20 bp, Homo Sapiens
cccttttccatatcttcatc

SEQ ID NO: 7885 - DNA, 20 bp, Homo Sapiens
ccttttccatatcttcatct

SEQ ID NO: 7886 - DNA, 20 bp, Homo Sapiens
cttttccatatcttcatctt

SEQ ID NO: 7887 - DNA, 20 bp, Homo Sapiens
ttttccatatcttcatcttc

SEQ ID NO: 7888 - DNA, 20 bp, Homo Sapiens
tttccatatcttcatcttcc

SEQ ID NO: 7889 - DNA, 20 bp, Homo Sapiens
ttccatatcttcatcttccc

SEQ ID NO: 7890 - DNA, 20 bp, Homo Sapiens
tccatatcttcatcttccct

SEQ ID NO: 7891 - DNA, 20 bp, Homo Sapiens
ccatatcttcatcttccctc

SEQ ID NO: 7892 - DNA, 20 bp, Homo Sapiens
catatcttcatcttccctct

SEQ ID NO: 7893 - DNA, 20 bp, Homo Sapiens
atatcttcatcttccctcta

SEQ ID NO: 7894 - DNA, 20 bp, Homo Sapiens
tatcttcatcttccctctac

SEQ ID NO: 7895 - DNA, 20 bp, Homo Sapiens
atcttcatcttccctctacc

SEQ ID NO: 7896 - DNA, 20 bp, Homo Sapiens
tcttcatcttccctctaccc

SEQ ID NO: 7897 - DNA, 20 bp, Homo Sapiens
cttcatcttccctctaccca

SEQ ID NO: 7898 - DNA, 20 bp, Homo Sapiens
ttcatcttccctctacccag

SEQ ID NO: 7899 - DNA, 20 bp, Homo Sapiens
tcatcttccctctacccaga

SEQ ID NO: 7900 - DNA, 20 bp, Homo Sapiens
catcttccctctacccagat

SEQ ID NO: 7901 - DNA, 20 bp, Homo Sapiens
atcttccctctacccagatt

SEQ ID NO: 7902 - DNA, 20 bp, Homo Sapiens
tcttccctctacccagattg

SEQ ID NO: 7903 - DNA, 20 bp, Homo Sapiens
cttccctctacccagattgt

SEQ ID NO: 7904 - DNA, 20 bp, Homo Sapiens
ttccctctacccagattgtg

SEQ ID NO: 7905 - DNA, 20 bp, Homo Sapiens
tccctctacccagattgtga

SEQ ID NO: 7906 - DNA, 20 bp, Homo Sapiens
ccctctacccagattgtgaa

SEQ ID NO: 7907 - DNA, 20 bp, Homo Sapiens
cctctacccagattgtgaag

SEQ ID NO: 7908 - DNA, 20 bp, Homo Sapiens
ctctacccagattgtgaaga

SEQ ID NO: 7909 - DNA, 20 bp, Homo Sapiens
tctacccagattgtgaagat

SEQ ID NO: 7910 - DNA, 20 bp, Homo Sapiens
ctacccagattgtgaagatg

SEQ ID NO: 7911 - DNA, 20 bp, Homo Sapiens
tacccagattgtgaagatgg

SEQ ID NO: 7912 - DNA, 20 bp, Homo Sapiens
acccagattgtgaagatgga

SEQ ID NO: 7913 - DNA, 20 bp, Homo Sapiens
cccagattgtgaagatggaa

SEQ ID NO: 7914 - DNA, 20 bp, Homo Sapiens
ccagattgtgaagatggaaa

SEQ ID NO: 7915 - DNA, 20 bp, Homo Sapiens
cagattgtgaagatggaaag

SEQ ID NO: 7916 - DNA, 20 bp, Homo Sapiens
agattgtgaagatggaaagg

SEQ ID NO: 7917 - DNA, 20 bp, Homo Sapiens
gattgtgaagatggaaaggg

SEQ ID NO: 7918 - DNA, 20 bp, Homo Sapiens
attgtgaagatggaaagggt

SEQ ID NO: 7919 - DNA, 20 bp, Homo Sapiens
ttgtgaagatggaaagggtc

SEQ ID NO: 7920 - DNA, 20 bp, Homo Sapiens
tgtgaagatggaaagggtcc

SEQ ID NO: 7921 - DNA, 20 bp, Homo Sapiens
gtgaagatggaaagggtcca

SEQ ID NO: 7922 - DNA, 20 bp, Homo Sapiens
tgaagatggaaagggtccaa

SEQ ID NO: 7923 - DNA, 20 bp, Homo Sapiens
gaagatggaaagggtccaac

SEQ ID NO: 7924 - DNA, 20 bp, Homo Sapiens
aagatggaaagggtccaacc

SEQ ID NO: 7925 - DNA, 20 bp, Homo Sapiens
agatggaaagggtccaaccc

SEQ ID NO: 7926 - DNA, 20 bp, Homo Sapiens
gatggaaagggtccaacccc

SEQ ID NO: 7927 - DNA, 20 bp, Homo Sapiens
atggaaagggtccaacccct

SEQ ID NO: 7928 - DNA, 20 bp, Homo Sapiens
tggaaagggtccaacccctg

SEQ ID NO: 7929 - DNA, 20 bp, Homo Sapiens
ggaaagggtccaacccctgg

SEQ ID NO: 7930 - DNA, 20 bp, Homo Sapiens
gaaagggtccaacccctgga

SEQ ID NO: 7931 - DNA, 20 bp, Homo Sapiens
aaagggtccaacccctggaa

SEQ ID NO: 7932 - DNA, 20 bp, Homo Sapiens
aagggtccaacccctggaag

SEQ ID NO: 7933 - DNA, 20 bp, Homo Sapiens
agggtccaacccctggaaga

SEQ ID NO: 7934 - DNA, 20 bp, Homo Sapiens
gggtccaacccctggaagag

SEQ ID NO: 7935 - DNA, 20 bp, Homo Sapiens
ggtccaacccctggaagaga

SEQ ID NO: 7936 - DNA, 20 bp, Homo Sapiens
gtccaacccctggaagagaa

SEQ ID NO: 7937 - DNA, 20 bp, Homo Sapiens
tccaacccctggaagagaat

SEQ ID NO: 7938 - DNA, 20 bp, Homo Sapiens
ccaacccctggaagagaatg

SEQ ID NO: 7939 - DNA, 20 bp, Homo Sapiens
caacccctggaagagaatgt

SEQ ID NO: 7940 - DNA, 20 bp, Homo Sapiens
aacccctggaagagaatgtg

SEQ ID NO: 7941 - DNA, 20 bp, Homo Sapiens
acccctggaagagaatgtgg

SEQ ID NO: 7942 - DNA, 20 bp, Homo Sapiens
cccctggaagagaatgtggg

SEQ ID NO: 7943 - DNA, 20 bp, Homo Sapiens
ccctggaagagaatgtggga

SEQ ID NO: 7944 - DNA, 20 bp, Homo Sapiens
cctggaagagaatgtgggaa

SEQ ID NO: 7945 - DNA, 20 bp, Homo Sapiens
ctggaagagaatgtgggaaa

SEQ ID NO: 7946 - DNA, 20 bp, Homo Sapiens
tggaagagaatgtgggaaat

SEQ ID NO: 7947 - DNA, 20 bp, Homo Sapiens
ggaagagaatgtgggaaatg

SEQ ID NO: 7948 - DNA, 20 bp, Homo Sapiens
gaagagaatgtgggaaatgc

SEQ ID NO: 7949 - DNA, 20 bp, Homo Sapiens
aagagaatgtgggaaatgca

SEQ ID NO: 7950 - DNA, 20 bp, Homo Sapiens
agagaatgtgggaaatgcag

SEQ ID NO: 7951 - DNA, 20 bp, Homo Sapiens
gagaatgtgggaaatgcagc

SEQ ID NO: 7952 - DNA, 20 bp, Homo Sapiens
agaatgtgggaaatgcagcc

SEQ ID NO: 7953 - DNA, 20 bp, Homo Sapiens
gaatgtgggaaatgcagcca

SEQ ID NO: 7954 - DNA, 20 bp, Homo Sapiens
aatgtgggaaatgcagccag

SEQ ID NO: 7955 - DNA, 20 bp, Homo Sapiens
atgtgggaaatgcagccagg

SEQ ID NO: 7956 - DNA, 20 bp, Homo Sapiens
tgtgggaaatgcagccaggc

SEQ ID NO: 7957 - DNA, 20 bp, Homo Sapiens
gtgggaaatgcagccaggcc

SEQ ID NO: 7958 - DNA, 20 bp, Homo Sapiens
tgggaaatgcagccaggcca

SEQ ID NO: 7959 - DNA, 20 bp, Homo Sapiens
gggaaatgcagccaggccaa

SEQ ID NO: 7960 - DNA, 20 bp, Homo Sapiens
ggaaatgcagccaggccaag

SEQ ID NO: 7961 - DNA, 20 bp, Homo Sapiens
gaaatgcagccaggccaaga

SEQ ID NO: 7962 - DNA, 20 bp, Homo Sapiens
aaatgcagccaggccaagat

SEQ ID NO: 7963 - DNA, 20 bp, Homo Sapiens
aatgcagccaggccaagatt

SEQ ID NO: 7964 - DNA, 20 bp, Homo Sapiens
atgcagccaggccaagattc

SEQ ID NO: 7965 - DNA, 20 bp, Homo Sapiens
tgcagccaggccaagattcg

SEQ ID NO: 7966 - DNA, 20 bp, Homo Sapiens
gcagccaggccaagattcga

SEQ ID NO: 7967 - DNA, 20 bp, Homo Sapiens
cagccaggccaagattcgag

SEQ ID NO: 7968 - DNA, 20 bp, Homo Sapiens
agccaggccaagattcgaga

SEQ ID NO: 7969 - DNA, 20 bp, Homo Sapiens
gccaggccaagattcgagag

SEQ ID NO: 7970 - DNA, 20 bp, Homo Sapiens
ccaggccaagattcgagagg

SEQ ID NO: 7971 - DNA, 20 bp, Homo Sapiens
caggccaagattcgagagga

SEQ ID NO: 7972 - DNA, 20 bp, Homo Sapiens
aggccaagattcgagaggaa

SEQ ID NO: 7973 - DNA, 20 bp, Homo Sapiens
ggccaagattcgagaggaac

SEQ ID NO: 7974 - DNA, 20 bp, Homo Sapiens
gccaagattcgagaggaaca

SEQ ID NO: 7975 - DNA, 20 bp, Homo Sapiens
ccaagattcgagaggaacaa

SEQ ID NO: 7976 - DNA, 20 bp, Homo Sapiens
caagattcgagaggaacaag

SEQ ID NO: 7977 - DNA, 20 bp, Homo Sapiens
aagattcgagaggaacaagc

SEQ ID NO: 7978 - DNA, 20 bp, Homo Sapiens
agattcgagaggaacaagct

SEQ ID NO: 7979 - DNA, 20 bp, Homo Sapiens
gattcgagaggaacaagcta

SEQ ID NO: 7980 - DNA, 20 bp, Homo Sapiens
attcgagaggaacaagctat

SEQ ID NO: 7981 - DNA, 20 bp, Homo Sapiens
ttcgagaggaacaagctatt

SEQ ID NO: 7982 - DNA, 20 bp, Homo Sapiens
tcgagaggaacaagctattg

SEQ ID NO: 7983 - DNA, 20 bp, Homo Sapiens
cgagaggaacaagctattgc

SEQ ID NO: 7984 - DNA, 20 bp, Homo Sapiens
gagaggaacaagctattgct

SEQ ID NO: 7985 - DNA, 20 bp, Homo Sapiens
agaggaacaagctattgctg

SEQ ID NO: 7986 - DNA, 20 bp, Homo Sapiens
gaggaacaagctattgctgg

SEQ ID NO: 7987 - DNA, 20 bp, Homo Sapiens
aggaacaagctattgctggt

SEQ ID NO: 7988 - DNA, 20 bp, Homo Sapiens
ggaacaagctattgctggtg

SEQ ID NO: 7989 - DNA, 20 bp, Homo Sapiens
gaacaagctattgctggtgg

SEQ ID NO: 7990 - DNA, 20 bp, Homo Sapiens
aacaagctattgctggtggc

SEQ ID NO: 7991 - DNA, 20 bp, Homo Sapiens
acaagctattgctggtggcc

SEQ ID NO: 7992 - DNA, 20 bp, Homo Sapiens
caagctattgctggtggcct

SEQ ID NO: 7993 - DNA, 20 bp, Homo Sapiens
aagctattgctggtggcctc

SEQ ID NO: 7994 - DNA, 20 bp, Homo Sapiens
agctattgctggtggcctct

SEQ ID NO: 7995 - DNA, 20 bp, Homo Sapiens
gctattgctggtggcctctg

SEQ ID NO: 7996 - DNA, 20 bp, Homo Sapiens
ctattgctggtggcctctgt

SEQ ID NO: 7997 - DNA, 20 bp, Homo Sapiens
tattgctggtggcctctgta

SEQ ID NO: 7998 - DNA, 20 bp, Homo Sapiens
attgctggtggcctctgtaa

SEQ ID NO: 7999 - DNA, 20 bp, Homo Sapiens
ttgctggtggcctctgtaat

SEQ ID NO: 8000 - DNA, 20 bp, Homo Sapiens
tgctggtggcctctgtaatt

SEQ ID NO: 8001 - DNA, 20 bp, Homo Sapiens
gctggtggcctctgtaattc

SEQ ID NO: 8002 - DNA, 20 bp, Homo Sapiens
ctggtggcctctgtaattca

SEQ ID NO: 8003 - DNA, 20 bp, Homo Sapiens
tggtggcctctgtaattcag

SEQ ID NO: 8004 - DNA, 20 bp, Homo Sapiens
ggtggcctctgtaattcagg

SEQ ID NO: 8005 - DNA, 20 bp, Homo Sapiens
gtggcctctgtaattcaggg

SEQ ID NO: 8006 - DNA, 20 bp, Homo Sapiens
tggcctctgtaattcaggga

SEQ ID NO: 8007 - DNA, 20 bp, Homo Sapiens
ggcctctgtaattcagggac

SEQ ID NO: 8008 - DNA, 20 bp, Homo Sapiens
gcctctgtaattcagggact

SEQ ID NO: 8009 - DNA, 20 bp, Homo Sapiens
cctctgtaattcagggactg

SEQ ID NO: 8010 - DNA, 20 bp, Homo Sapiens
ctctgtaattcagggactgg

SEQ ID NO: 8011 - DNA, 20 bp, Homo Sapiens
tctgtaattcagggactggg

SEQ ID NO: 8012 - DNA, 20 bp, Homo Sapiens
ctgtaattcagggactgggg

SEQ ID NO: 8013 - DNA, 20 bp, Homo Sapiens
tgtaattcagggactggggc

SEQ ID NO: 8014 - DNA, 20 bp, Homo Sapiens
gtaattcagggactggggct

SEQ ID NO: 8015 - DNA, 20 bp, Homo Sapiens
taattcagggactggggctg

SEQ ID NO: 8016 - DNA, 20 bp, Homo Sapiens
aattcagggactggggctgc

SEQ ID NO: 8017 - DNA, 20 bp, Homo Sapiens
attcagggactggggctgct

SEQ ID NO: 8018 - DNA, 20 bp, Homo Sapiens
ttcagggactggggctgctc

SEQ ID NO: 8019 - DNA, 20 bp, Homo Sapiens
tcagggactggggctgctcc

SEQ ID NO: 8020 - DNA, 20 bp, Homo Sapiens
cagggactggggctgctcct

SEQ ID NO: 8021 - DNA, 20 bp, Homo Sapiens
agggactggggctgctcctg

SEQ ID NO: 8022 - DNA, 20 bp, Homo Sapiens
gggactggggctgctcctgt

SEQ ID NO: 8023 - DNA, 20 bp, Homo Sapiens
ggactggggctgctcctgtg

SEQ ID NO: 8024 - DNA, 20 bp, Homo Sapiens
gactggggctgctcctgtgc

SEQ ID NO: 8025 - DNA, 20 bp, Homo Sapiens
actggggctgctcctgtgct

SEQ ID NO: 8026 - DNA, 20 bp, Homo Sapiens
ctggggctgctcctgtgctt

SEQ ID NO: 8027 - DNA, 20 bp, Homo Sapiens
tggggctgctcctgtgcttc

SEQ ID NO: 8028 - DNA, 20 bp, Homo Sapiens
ggggctgctcctgtgcttca

SEQ ID NO: 8029 - DNA, 20 bp, Homo Sapiens
gggctgctcctgtgcttcac

SEQ ID NO: 8030 - DNA, 20 bp, Homo Sapiens
ggctgctcctgtgcttcacc

SEQ ID NO: 8031 - DNA, 20 bp, Homo Sapiens
gctgctcctgtgcttcacct

SEQ ID NO: 8032 - DNA, 20 bp, Homo Sapiens
ctgctcctgtgcttcaccta

SEQ ID NO: 8033 - DNA, 20 bp, Homo Sapiens
tgctcctgtgcttcacctac

SEQ ID NO: 8034 - DNA, 20 bp, Homo Sapiens
gctcctgtgcttcacctaca

SEQ ID NO: 8035 - DNA, 20 bp, Homo Sapiens
ctcctgtgcttcacctacat

SEQ ID NO: 8036 - DNA, 20 bp, Homo Sapiens
tcctgtgcttcacctacatc

SEQ ID NO: 8037 - DNA, 20 bp, Homo Sapiens
cctgtgcttcacctacatct

SEQ ID NO: 8038 - DNA, 20 bp, Homo Sapiens
ctgtgcttcacctacatctg

SEQ ID NO: 8039 - DNA, 20 bp, Homo Sapiens
tgtgcttcacctacatctgc

SEQ ID NO: 8040 - DNA, 20 bp, Homo Sapiens
gtgcttcacctacatctgcc

SEQ ID NO: 8041 - DNA, 20 bp, Homo Sapiens
tgcttcacctacatctgcct

SEQ ID NO: 8042 - DNA, 20 bp, Homo Sapiens
gcttcacctacatctgcctg

SEQ ID NO: 8043 - DNA, 20 bp, Homo Sapiens
cttcacctacatctgcctgc

SEQ ID NO: 8044 - DNA, 20 bp, Homo Sapiens
ttcacctacatctgcctgca

SEQ ID NO: 8045 - DNA, 20 bp, Homo Sapiens
tcacctacatctgcctgcac

SEQ ID NO: 8046 - DNA, 20 bp, Homo Sapiens
cacctacatctgcctgcact

SEQ ID NO: 8047 - DNA, 20 bp, Homo Sapiens
acctacatctgcctgcactt

SEQ ID NO: 8048 - DNA, 20 bp, Homo Sapiens
cctacatctgcctgcacttc

SEQ ID NO: 8049 - DNA, 20 bp, Homo Sapiens
ctacatctgcctgcacttct

SEQ ID NO: 8050 - DNA, 20 bp, Homo Sapiens
tacatctgcctgcacttctc

SEQ ID NO: 8051 - DNA, 20 bp, Homo Sapiens
acatctgcctgcacttctct

SEQ ID NO: 8052 - DNA, 20 bp, Homo Sapiens
catctgcctgcacttctctg

SEQ ID NO: 8053 - DNA, 20 bp, Homo Sapiens
atctgcctgcacttctctgc

SEQ ID NO: 8054 - DNA, 20 bp, Homo Sapiens
tctgcctgcacttctctgct

SEQ ID NO: 8055 - DNA, 20 bp, Homo Sapiens
ctgcctgcacttctctgctc

SEQ ID NO: 8056 - DNA, 20 bp, Homo Sapiens
tgcctgcacttctctgctct

SEQ ID NO: 8057 - DNA, 20 bp, Homo Sapiens
gcctgcacttctctgctctt

SEQ ID NO: 8058 - DNA, 20 bp, Homo Sapiens
cctgcacttctctgctcttc

SEQ ID NO: 8059 - DNA, 20 bp, Homo Sapiens
ctgcacttctctgctcttca

SEQ ID NO: 8060 - DNA, 20 bp, Homo Sapiens
tgcacttctctgctcttcag

SEQ ID NO: 8061 - DNA, 20 bp, Homo Sapiens
gcacttctctgctcttcagg

SEQ ID NO: 8062 - DNA, 20 bp, Homo Sapiens
cacttctctgctcttcaggt

SEQ ID NO: 8063 - DNA, 20 bp, Homo Sapiens
acttctctgctcttcaggta

SEQ ID NO: 8064 - DNA, 20 bp, Homo Sapiens
cttctctgctcttcaggtat

SEQ ID NO: 8065 - DNA, 20 bp, Homo Sapiens
ttctctgctcttcaggtatc

SEQ ID NO: 8066 - DNA, 20 bp, Homo Sapiens
tctctgctcttcaggtatca

SEQ ID NO: 8067 - DNA, 20 bp, Homo Sapiens
ctctgctcttcaggtatcac

SEQ ID NO: 8068 - DNA, 20 bp, Homo Sapiens
tctgctcttcaggtatcaca

SEQ ID NO: 8069 - DNA, 20 bp, Homo Sapiens
ctgctcttcaggtatcacat

SEQ ID NO: 8070 - DNA, 20 bp, Homo Sapiens
tgctcttcaggtatcacatc

SEQ ID NO: 8071 - DNA, 20 bp, Homo Sapiens
gctcttcaggtatcacatcg

SEQ ID NO: 8072 - DNA, 20 bp, Homo Sapiens
ctcttcaggtatcacatcgg

SEQ ID NO: 8073 - DNA, 20 bp, Homo Sapiens
tcttcaggtatcacatcggt

SEQ ID NO: 8074 - DNA, 20 bp, Homo Sapiens
cttcaggtatcacatcggta

SEQ ID NO: 8075 - DNA, 20 bp, Homo Sapiens
ttcaggtatcacatcggtat

SEQ ID NO: 8076 - DNA, 20 bp, Homo Sapiens
tcaggtatcacatcggtatc

SEQ ID NO: 8077 - DNA, 20 bp, Homo Sapiens
caggtatcacatcggtatcc

SEQ ID NO: 8078 - DNA, 20 bp, Homo Sapiens
aggtatcacatcggtatcct

SEQ ID NO: 8079 - DNA, 20 bp, Homo Sapiens
ggtatcacatcggtatcctc

SEQ ID NO: 8080 - DNA, 20 bp, Homo Sapiens
gtatcacatcggtatcctcg

SEQ ID NO: 8081 - DNA, 20 bp, Homo Sapiens
tatcacatcggtatcctcga

SEQ ID NO: 8082 - DNA, 20 bp, Homo Sapiens
atcacatcggtatcctcgaa

SEQ ID NO: 8083 - DNA, 20 bp, Homo Sapiens
tcacatcggtatcctcgaat

SEQ ID NO: 8084 - DNA, 20 bp, Homo Sapiens
cacatcggtatcctcgaatt

SEQ ID NO: 8085 - DNA, 20 bp, Homo Sapiens
acatcggtatcctcgaattc

SEQ ID NO: 8086 - DNA, 20 bp, Homo Sapiens
catcggtatcctcgaattca

SEQ ID NO: 8087 - DNA, 20 bp, Homo Sapiens
atcggtatcctcgaattcaa

SEQ ID NO: 8088 - DNA, 20 bp, Homo Sapiens
tcggtatcctcgaattcaaa

SEQ ID NO: 8089 - DNA, 20 bp, Homo Sapiens
cggtatcctcgaattcaaag

SEQ ID NO: 8090 - DNA, 20 bp, Homo Sapiens
ggtatcctcgaattcaaagt

SEQ ID NO: 8091 - DNA, 20 bp, Homo Sapiens
gtatcctcgaattcaaagta

SEQ ID NO: 8092 - DNA, 20 bp, Homo Sapiens
tatcctcgaattcaaagtat

SEQ ID NO: 8093 - DNA, 20 bp, Homo Sapiens
atcctcgaattcaaagtatc

SEQ ID NO: 8094 - DNA, 20 bp, Homo Sapiens
tcctcgaattcaaagtatca

SEQ ID NO: 8095 - DNA, 20 bp, Homo Sapiens
cctcgaattcaaagtatcaa

SEQ ID NO: 8096 - DNA, 20 bp, Homo Sapiens
ctcgaattcaaagtatcaaa

SEQ ID NO: 8097 - DNA, 20 bp, Homo Sapiens
tcgaattcaaagtatcaaag

SEQ ID NO: 8098 - DNA, 20 bp, Homo Sapiens
cgaattcaaagtatcaaagt

SEQ ID NO: 8099 - DNA, 20 bp, Homo Sapiens
gaattcaaagtatcaaagta

SEQ ID NO: 8100 - DNA, 20 bp, Homo Sapiens
aattcaaagtatcaaagtac

SEQ ID NO: 8101 - DNA, 20 bp, Homo Sapiens
attcaaagtatcaaagtaca

SEQ ID NO: 8102 - DNA, 20 bp, Homo Sapiens
ttcaaagtatcaaagtacaa

SEQ ID NO: 8103 - DNA, 20 bp, Homo Sapiens
tcaaagtatcaaagtacaat

SEQ ID NO: 8104 - DNA, 20 bp, Homo Sapiens
caaagtatcaaagtacaatt

SEQ ID NO: 8105 - DNA, 20 bp, Homo Sapiens
aaagtatcaaagtacaattt

SEQ ID NO: 8106 - DNA, 20 bp, Homo Sapiens
aagtatcaaagtacaattta

SEQ ID NO: 8107 - DNA, 20 bp, Homo Sapiens
agtatcaaagtacaatttac

SEQ ID NO: 8108 - DNA, 20 bp, Homo Sapiens
gtatcaaagtacaatttacc

SEQ ID NO: 8109 - DNA, 20 bp, Homo Sapiens
tatcaaagtacaatttaccg

SEQ ID NO: 8110 - DNA, 20 bp, Homo Sapiens
atcaaagtacaatttaccga

SEQ ID NO: 8111 - DNA, 20 bp, Homo Sapiens
tcaaagtacaatttaccgaa

SEQ ID NO: 8112 - DNA, 20 bp, Homo Sapiens
caaagtacaatttaccgaat

SEQ ID NO: 8113 - DNA, 20 bp, Homo Sapiens
aaagtacaatttaccgaata

SEQ ID NO: 8114 - DNA, 20 bp, Homo Sapiens
aagtacaatttaccgaatat

SEQ ID NO: 8115 - DNA, 20 bp, Homo Sapiens
agtacaatttaccgaatata

SEQ ID NO: 8116 - DNA, 20 bp, Homo Sapiens
gtacaatttaccgaatataa

SEQ ID NO: 8117 - DNA, 20 bp, Homo Sapiens
tacaatttaccgaatataag

SEQ ID NO: 8118 - DNA, 20 bp, Homo Sapiens
acaatttaccgaatataaga

SEQ ID NO: 8119 - DNA, 20 bp, Homo Sapiens
caatttaccgaatataagaa

SEQ ID NO: 8120 - DNA, 20 bp, Homo Sapiens
aatttaccgaatataagaag

SEQ ID NO: 8121 - DNA, 20 bp, Homo Sapiens
atttaccgaatataagaagg

SEQ ID NO: 8122 - DNA, 20 bp, Homo Sapiens
tttaccgaatataagaagga

SEQ ID NO: 8123 - DNA, 20 bp, Homo Sapiens
ttaccgaatataagaaggag

SEQ ID NO: 8124 - DNA, 20 bp, Homo Sapiens
taccgaatataagaaggaga

SEQ ID NO: 8125 - DNA, 20 bp, Homo Sapiens
accgaatataagaaggagaa

SEQ ID NO: 8126 - DNA, 20 bp, Homo Sapiens
ccgaatataagaaggagaaa

SEQ ID NO: 8127 - DNA, 20 bp, Homo Sapiens
cgaatataagaaggagaaag

SEQ ID NO: 8128 - DNA, 20 bp, Homo Sapiens
gaatataagaaggagaaagg

SEQ ID NO: 8129 - DNA, 20 bp, Homo Sapiens
aatataagaaggagaaaggt

SEQ ID NO: 8130 - DNA, 20 bp, Homo Sapiens
atataagaaggagaaaggtt

SEQ ID NO: 8131 - DNA, 20 bp, Homo Sapiens
tataagaaggagaaaggttt

SEQ ID NO: 8132 - DNA, 20 bp, Homo Sapiens
ataagaaggagaaaggtttc

SEQ ID NO: 8133 - DNA, 20 bp, Homo Sapiens
taagaaggagaaaggtttca

SEQ ID NO: 8134 - DNA, 20 bp, Homo Sapiens
aagaaggagaaaggtttcat

SEQ ID NO: 8135 - DNA, 20 bp, Homo Sapiens
agaaggagaaaggtttcatc

SEQ ID NO: 8136 - DNA, 20 bp, Homo Sapiens
gaaggagaaaggtttcatcc

SEQ ID NO: 8137 - DNA, 20 bp, Homo Sapiens
aaggagaaaggtttcatcct

SEQ ID NO: 8138 - DNA, 20 bp, Homo Sapiens
aggagaaaggtttcatcctc

SEQ ID NO: 8139 - DNA, 20 bp, Homo Sapiens
ggagaaaggtttcatcctca

SEQ ID NO: 8140 - DNA, 20 bp, Homo Sapiens
gagaaaggtttcatcctcac

SEQ ID NO: 8141 - DNA, 20 bp, Homo Sapiens
agaaaggtttcatcctcact

SEQ ID NO: 8142 - DNA, 20 bp, Homo Sapiens
gaaaggtttcatcctcactt

SEQ ID NO: 8143 - DNA, 20 bp, Homo Sapiens
aaaggtttcatcctcacttc

SEQ ID NO: 8144 - DNA, 20 bp, Homo Sapiens
aaggtttcatcctcacttcc

SEQ ID NO: 8145 - DNA, 20 bp, Homo Sapiens
aggtttcatcctcacttccc

SEQ ID NO: 8146 - DNA, 20 bp, Homo Sapiens
ggtttcatcctcacttccca

SEQ ID NO: 8147 - DNA, 20 bp, Homo Sapiens
gtttcatcctcacttcccaa

SEQ ID NO: 8148 - DNA, 20 bp, Homo Sapiens
tttcatcctcacttcccaaa

SEQ ID NO: 8149 - DNA, 20 bp, Homo Sapiens
ttcatcctcacttcccaaaa

SEQ ID NO: 8150 - DNA, 20 bp, Homo Sapiens
tcatcctcacttcccaaaag

SEQ ID NO: 8151 - DNA, 20 bp, Homo Sapiens
catcctcacttcccaaaagg

SEQ ID NO: 8152 - DNA, 20 bp, Homo Sapiens
atcctcacttcccaaaagga

SEQ ID NO: 8153 - DNA, 20 bp, Homo Sapiens
tcctcacttcccaaaaggag

SEQ ID NO: 8154 - DNA, 20 bp, Homo Sapiens
cctcacttcccaaaaggagg

SEQ ID NO: 8155 - DNA, 20 bp, Homo Sapiens
ctcacttcccaaaaggagga

SEQ ID NO: 8156 - DNA, 20 bp, Homo Sapiens
tcacttcccaaaaggaggat

SEQ ID NO: 8157 - DNA, 20 bp, Homo Sapiens
cacttcccaaaaggaggatg

SEQ ID NO: 8158 - DNA, 20 bp, Homo Sapiens
acttcccaaaaggaggatga

SEQ ID NO: 8159 - DNA, 20 bp, Homo Sapiens
cttcccaaaaggaggatgaa

SEQ ID NO: 8160 - DNA, 20 bp, Homo Sapiens
ttcccaaaaggaggatgaaa

SEQ ID NO: 8161 - DNA, 20 bp, Homo Sapiens
tcccaaaaggaggatgaaat

SEQ ID NO: 8162 - DNA, 20 bp, Homo Sapiens
cccaaaaggaggatgaaatc

SEQ ID NO: 8163 - DNA, 20 bp, Homo Sapiens
ccaaaaggaggatgaaatca

SEQ ID NO: 8164 - DNA, 20 bp, Homo Sapiens
caaaaggaggatgaaatcat

SEQ ID NO: 8165 - DNA, 20 bp, Homo Sapiens
aaaaggaggatgaaatcatg

SEQ ID NO: 8166 - DNA, 20 bp, Homo Sapiens
aaaggaggatgaaatcatga

SEQ ID NO: 8167 - DNA, 20 bp, Homo Sapiens
aaggaggatgaaatcatgaa

SEQ ID NO: 8168 - DNA, 20 bp, Homo Sapiens
aggaggatgaaatcatgaag

SEQ ID NO: 8169 - DNA, 20 bp, Homo Sapiens
ggaggatgaaatcatgaagg

SEQ ID NO: 8170 - DNA, 20 bp, Homo Sapiens
gaggatgaaatcatgaaggt

SEQ ID NO: 8171 - DNA, 20 bp, Homo Sapiens
aggatgaaatcatgaaggtg

SEQ ID NO: 8172 - DNA, 20 bp, Homo Sapiens
ggatgaaatcatgaaggtgc

SEQ ID NO: 8173 - DNA, 20 bp, Homo Sapiens
gatgaaatcatgaaggtgca

SEQ ID NO: 8174 - DNA, 20 bp, Homo Sapiens
atgaaatcatgaaggtgcag

SEQ ID NO: 8175 - DNA, 20 bp, Homo Sapiens
tgaaatcatgaaggtgcaga

SEQ ID NO: 8176 - DNA, 20 bp, Homo Sapiens
gaaatcatgaaggtgcagaa

SEQ ID NO: 8177 - DNA, 20 bp, Homo Sapiens
aaatcatgaaggtgcagaac

SEQ ID NO: 8178 - DNA, 20 bp, Homo Sapiens
aatcatgaaggtgcagaaca

SEQ ID NO: 8179 - DNA, 20 bp, Homo Sapiens
atcatgaaggtgcagaacaa

SEQ ID NO: 8180 - DNA, 20 bp, Homo Sapiens
tcatgaaggtgcagaacaac

SEQ ID NO: 8181 - DNA, 20 bp, Homo Sapiens
catgaaggtgcagaacaact

SEQ ID NO: 8182 - DNA, 20 bp, Homo Sapiens
atgaaggtgcagaacaactc

SEQ ID NO: 8183 - DNA, 20 bp, Homo Sapiens
tgaaggtgcagaacaactca

SEQ ID NO: 8184 - DNA, 20 bp, Homo Sapiens
gaaggtgcagaacaactcag

SEQ ID NO: 8185 - DNA, 20 bp, Homo Sapiens
aaggtgcagaacaactcagt

SEQ ID NO: 8186 - DNA, 20 bp, Homo Sapiens
aggtgcagaacaactcagtc

SEQ ID NO: 8187 - DNA, 20 bp, Homo Sapiens
ggtgcagaacaactcagtca

SEQ ID NO: 8188 - DNA, 20 bp, Homo Sapiens
gtgcagaacaactcagtcat

SEQ ID NO: 8189 - DNA, 20 bp, Homo Sapiens
tgcagaacaactcagtcatc

SEQ ID NO: 8190 - DNA, 20 bp, Homo Sapiens
gcagaacaactcagtcatca

SEQ ID NO: 8191 - DNA, 20 bp, Homo Sapiens
cagaacaactcagtcatcat

SEQ ID NO: 8192 - DNA, 20 bp, Homo Sapiens
agaacaactcagtcatcatc

SEQ ID NO: 8193 - DNA, 20 bp, Homo Sapiens
gaacaactcagtcatcatca

SEQ ID NO: 8194 - DNA, 20 bp, Homo Sapiens
aacaactcagtcatcatcaa

SEQ ID NO: 8195 - DNA, 20 bp, Homo Sapiens
acaactcagtcatcatcaac

SEQ ID NO: 8196 - DNA, 20 bp, Homo Sapiens
caactcagtcatcatcaact

SEQ ID NO: 8197 - DNA, 20 bp, Homo Sapiens
aactcagtcatcatcaactg

SEQ ID NO: 8198 - DNA, 20 bp, Homo Sapiens
actcagtcatcatcaactgt

SEQ ID NO: 8199 - DNA, 20 bp, Homo Sapiens
ctcagtcatcatcaactgtg

SEQ ID NO: 8200 - DNA, 20 bp, Homo Sapiens
tcagtcatcatcaactgtga

SEQ ID NO: 8201 - DNA, 20 bp, Homo Sapiens
cagtcatcatcaactgtgat

SEQ ID NO: 8202 - DNA, 20 bp, Homo Sapiens
agtcatcatcaactgtgatg

SEQ ID NO: 8203 - DNA, 20 bp, Homo Sapiens
gtcatcatcaactgtgatgg

SEQ ID NO: 8204 - DNA, 20 bp, Homo Sapiens
tcatcatcaactgtgatggg

SEQ ID NO: 8205 - DNA, 20 bp, Homo Sapiens
catcatcaactgtgatgggt

SEQ ID NO: 8206 - DNA, 20 bp, Homo Sapiens
atcatcaactgtgatgggtt

SEQ ID NO: 8207 - DNA, 20 bp, Homo Sapiens
tcatcaactgtgatgggttt

SEQ ID NO: 8208 - DNA, 20 bp, Homo Sapiens
catcaactgtgatgggtttt

SEQ ID NO: 8209 - DNA, 20 bp, Homo Sapiens
atcaactgtgatgggtttta

SEQ ID NO: 8210 - DNA, 20 bp, Homo Sapiens
tcaactgtgatgggttttat

SEQ ID NO: 8211 - DNA, 20 bp, Homo Sapiens
caactgtgatgggttttatc

SEQ ID NO: 8212 - DNA, 20 bp, Homo Sapiens
aactgtgatgggttttatct

SEQ ID NO: 8213 - DNA, 20 bp, Homo Sapiens
actgtgatgggttttatctc

SEQ ID NO: 8214 - DNA, 20 bp, Homo Sapiens
ctgtgatgggttttatctca

SEQ ID NO: 8215 - DNA, 20 bp, Homo Sapiens
tgtgatgggttttatctcat

SEQ ID NO: 8216 - DNA, 20 bp, Homo Sapiens
gtgatgggttttatctcatc

SEQ ID NO: 8217 - DNA, 20 bp, Homo Sapiens
tgatgggttttatctcatct

SEQ ID NO: 8218 - DNA, 20 bp, Homo Sapiens
gatgggttttatctcatctc

SEQ ID NO: 8219 - DNA, 20 bp, Homo Sapiens
atgggttttatctcatctcc

SEQ ID NO: 8220 - DNA, 20 bp, Homo Sapiens
tgggttttatctcatctccc

SEQ ID NO: 8221 - DNA, 20 bp, Homo Sapiens
gggttttatctcatctccct

SEQ ID NO: 8222 - DNA, 20 bp, Homo Sapiens
ggttttatctcatctccctg

SEQ ID NO: 8223 - DNA, 20 bp, Homo Sapiens
gttttatctcatctccctga

SEQ ID NO: 8224 - DNA, 20 bp, Homo Sapiens
ttttatctcatctccctgaa

SEQ ID NO: 8225 - DNA, 20 bp, Homo Sapiens
tttatctcatctccctgaag

SEQ ID NO: 8226 - DNA, 20 bp, Homo Sapiens
ttatctcatctccctgaagg

SEQ ID NO: 8227 - DNA, 20 bp, Homo Sapiens
tatctcatctccctgaaggg

SEQ ID NO: 8228 - DNA, 20 bp, Homo Sapiens
atctcatctccctgaagggc

SEQ ID NO: 8229 - DNA, 20 bp, Homo Sapiens
tctcatctccctgaagggct

SEQ ID NO: 8230 - DNA, 20 bp, Homo Sapiens
ctcatctccctgaagggcta

SEQ ID NO: 8231 - DNA, 20 bp, Homo Sapiens
tcatctccctgaagggctac

SEQ ID NO: 8232 - DNA, 20 bp, Homo Sapiens
catctccctgaagggctact

SEQ ID NO: 8233 - DNA, 20 bp, Homo Sapiens
atctccctgaagggctactt

SEQ ID NO: 8234 - DNA, 20 bp, Homo Sapiens
tctccctgaagggctacttc

SEQ ID NO: 8235 - DNA, 20 bp, Homo Sapiens
ctccctgaagggctacttct

SEQ ID NO: 8236 - DNA, 20 bp, Homo Sapiens
tccctgaagggctacttctc

SEQ ID NO: 8237 - DNA, 20 bp, Homo Sapiens
ccctgaagggctacttctcc

SEQ ID NO: 8238 - DNA, 20 bp, Homo Sapiens
cctgaagggctacttctccc

SEQ ID NO: 8239 - DNA, 20 bp, Homo Sapiens
ctgaagggctacttctccca

SEQ ID NO: 8240 - DNA, 20 bp, Homo Sapiens
tgaagggctacttctcccag

SEQ ID NO: 8241 - DNA, 20 bp, Homo Sapiens
gaagggctacttctcccagg

SEQ ID NO: 8242 - DNA, 20 bp, Homo Sapiens
aagggctacttctcccagga

SEQ ID NO: 8243 - DNA, 20 bp, Homo Sapiens
agggctacttctcccaggaa

SEQ ID NO: 8244 - DNA, 20 bp, Homo Sapiens
gggctacttctcccaggaag

SEQ ID NO: 8245 - DNA, 20 bp, Homo Sapiens
ggctacttctcccaggaagt

SEQ ID NO: 8246 - DNA, 20 bp, Homo Sapiens
gctacttctcccaggaagtc

SEQ ID NO: 8247 - DNA, 20 bp, Homo Sapiens
ctacttctcccaggaagtca

SEQ ID NO: 8248 - DNA, 20 bp, Homo Sapiens
tacttctcccaggaagtcaa

SEQ ID NO: 8249 - DNA, 20 bp, Homo Sapiens
acttctcccaggaagtcaac

SEQ ID NO: 8250 - DNA, 20 bp, Homo Sapiens
cttctcccaggaagtcaaca

SEQ ID NO: 8251 - DNA, 20 bp, Homo Sapiens
ttctcccaggaagtcaacat

SEQ ID NO: 8252 - DNA, 20 bp, Homo Sapiens
tctcccaggaagtcaacatt

SEQ ID NO: 8253 - DNA, 20 bp, Homo Sapiens
ctcccaggaagtcaacatta

SEQ ID NO: 8254 - DNA, 20 bp, Homo Sapiens
tcccaggaagtcaacattag

SEQ ID NO: 8255 - DNA, 20 bp, Homo Sapiens
cccaggaagtcaacattagc

SEQ ID NO: 8256 - DNA, 20 bp, Homo Sapiens
ccaggaagtcaacattagcc

SEQ ID NO: 8257 - DNA, 20 bp, Homo Sapiens
caggaagtcaacattagcct

SEQ ID NO: 8258 - DNA, 20 bp, Homo Sapiens
aggaagtcaacattagcctt

SEQ ID NO: 8259 - DNA, 20 bp, Homo Sapiens
ggaagtcaacattagccttc

SEQ ID NO: 8260 - DNA, 20 bp, Homo Sapiens
gaagtcaacattagccttca

SEQ ID NO: 8261 - DNA, 20 bp, Homo Sapiens
aagtcaacattagccttcat

SEQ ID NO: 8262 - DNA, 20 bp, Homo Sapiens
agtcaacattagccttcatt

SEQ ID NO: 8263 - DNA, 20 bp, Homo Sapiens
gtcaacattagccttcatta

SEQ ID NO: 8264 - DNA, 20 bp, Homo Sapiens
tcaacattagccttcattac

SEQ ID NO: 8265 - DNA, 20 bp, Homo Sapiens
caacattagccttcattacc

SEQ ID NO: 8266 - DNA, 20 bp, Homo Sapiens
aacattagccttcattacca

SEQ ID NO: 8267 - DNA, 20 bp, Homo Sapiens
acattagccttcattaccag

SEQ ID NO: 8268 - DNA, 20 bp, Homo Sapiens
cattagccttcattaccaga

SEQ ID NO: 8269 - DNA, 20 bp, Homo Sapiens
attagccttcattaccagaa

SEQ ID NO: 8270 - DNA, 20 bp, Homo Sapiens
ttagccttcattaccagaag

SEQ ID NO: 8271 - DNA, 20 bp, Homo Sapiens
tagccttcattaccagaagg

SEQ ID NO: 8272 - DNA, 20 bp, Homo Sapiens
agccttcattaccagaagga

SEQ ID NO: 8273 - DNA, 20 bp, Homo Sapiens
gccttcattaccagaaggat

SEQ ID NO: 8274 - DNA, 20 bp, Homo Sapiens
ccttcattaccagaaggatg

SEQ ID NO: 8275 - DNA, 20 bp, Homo Sapiens
cttcattaccagaaggatga

SEQ ID NO: 8276 - DNA, 20 bp, Homo Sapiens
ttcattaccagaaggatgag

SEQ ID NO: 8277 - DNA, 20 bp, Homo Sapiens
tcattaccagaaggatgagg

SEQ ID NO: 8278 - DNA, 20 bp, Homo Sapiens
cattaccagaaggatgagga

SEQ ID NO: 8279 - DNA, 20 bp, Homo Sapiens
attaccagaaggatgaggag

SEQ ID NO: 8280 - DNA, 20 bp, Homo Sapiens
ttaccagaaggatgaggagc

SEQ ID NO: 8281 - DNA, 20 bp, Homo Sapiens
taccagaaggatgaggagcc

SEQ ID NO: 8282 - DNA, 20 bp, Homo Sapiens
accagaaggatgaggagccc

SEQ ID NO: 8283 - DNA, 20 bp, Homo Sapiens
ccagaaggatgaggagcccc

SEQ ID NO: 8284 - DNA, 20 bp, Homo Sapiens
cagaaggatgaggagcccct

SEQ ID NO: 8285 - DNA, 20 bp, Homo Sapiens
agaaggatgaggagcccctc

SEQ ID NO: 8286 - DNA, 20 bp, Homo Sapiens
gaaggatgaggagcccctct

SEQ ID NO: 8287 - DNA, 20 bp, Homo Sapiens
aaggatgaggagcccctctt

SEQ ID NO: 8288 - DNA, 20 bp, Homo Sapiens
aggatgaggagcccctcttc

SEQ ID NO: 8289 - DNA, 20 bp, Homo Sapiens
ggatgaggagcccctcttcc

SEQ ID NO: 8290 - DNA, 20 bp, Homo Sapiens
gatgaggagcccctcttcca

SEQ ID NO: 8291 - DNA, 20 bp, Homo Sapiens
atgaggagcccctcttccaa

SEQ ID NO: 8292 - DNA, 20 bp, Homo Sapiens
tgaggagcccctcttccaac

SEQ ID NO: 8293 - DNA, 20 bp, Homo Sapiens
gaggagcccctcttccaact

SEQ ID NO: 8294 - DNA, 20 bp, Homo Sapiens
aggagcccctcttccaactg

SEQ ID NO: 8295 - DNA, 20 bp, Homo Sapiens
ggagcccctcttccaactga

SEQ ID NO: 8296 - DNA, 20 bp, Homo Sapiens
gagcccctcttccaactgaa

SEQ ID NO: 8297 - DNA, 20 bp, Homo Sapiens
agcccctcttccaactgaag

SEQ ID NO: 8298 - DNA, 20 bp, Homo Sapiens
gcccctcttccaactgaaga

SEQ ID NO: 8299 - DNA, 20 bp, Homo Sapiens
cccctcttccaactgaagaa

SEQ ID NO: 8300 - DNA, 20 bp, Homo Sapiens
ccctcttccaactgaagaag

SEQ ID NO: 8301 - DNA, 20 bp, Homo Sapiens
cctcttccaactgaagaagg

SEQ ID NO: 8302 - DNA, 20 bp, Homo Sapiens
ctcttccaactgaagaaggt

SEQ ID NO: 8303 - DNA, 20 bp, Homo Sapiens
tcttccaactgaagaaggtc

SEQ ID NO: 8304 - DNA, 20 bp, Homo Sapiens
cttccaactgaagaaggtca

SEQ ID NO: 8305 - DNA, 20 bp, Homo Sapiens
ttccaactgaagaaggtcag

SEQ ID NO: 8306 - DNA, 20 bp, Homo Sapiens
tccaactgaagaaggtcagg

SEQ ID NO: 8307 - DNA, 20 bp, Homo Sapiens
ccaactgaagaaggtcaggt

SEQ ID NO: 8308 - DNA, 20 bp, Homo Sapiens
caactgaagaaggtcaggtc

SEQ ID NO: 8309 - DNA, 20 bp, Homo Sapiens
aactgaagaaggtcaggtct

SEQ ID NO: 8310 - DNA, 20 bp, Homo Sapiens
actgaagaaggtcaggtctg

SEQ ID NO: 8311 - DNA, 20 bp, Homo Sapiens
ctgaagaaggtcaggtctgt

SEQ ID NO: 8312 - DNA, 20 bp, Homo Sapiens
tgaagaaggtcaggtctgtc

SEQ ID NO: 8313 - DNA, 20 bp, Homo Sapiens
gaagaaggtcaggtctgtca

SEQ ID NO: 8314 - DNA, 20 bp, Homo Sapiens
aagaaggtcaggtctgtcaa

SEQ ID NO: 8315 - DNA, 20 bp, Homo Sapiens
agaaggtcaggtctgtcaac

SEQ ID NO: 8316 - DNA, 20 bp, Homo Sapiens
gaaggtcaggtctgtcaact

SEQ ID NO: 8317 - DNA, 20 bp, Homo Sapiens
aaggtcaggtctgtcaactc

SEQ ID NO: 8318 - DNA, 20 bp, Homo Sapiens
aggtcaggtctgtcaactcc

SEQ ID NO: 8319 - DNA, 20 bp, Homo Sapiens
ggtcaggtctgtcaactcct

SEQ ID NO: 8320 - DNA, 20 bp, Homo Sapiens
gtcaggtctgtcaactcctt

SEQ ID NO: 8321 - DNA, 20 bp, Homo Sapiens
tcaggtctgtcaactccttg

SEQ ID NO: 8322 - DNA, 20 bp, Homo Sapiens
caggtctgtcaactccttga

SEQ ID NO: 8323 - DNA, 20 bp, Homo Sapiens
aggtctgtcaactccttgat

SEQ ID NO: 8324 - DNA, 20 bp, Homo Sapiens
ggtctgtcaactccttgatg

SEQ ID NO: 8325 - DNA, 20 bp, Homo Sapiens
gtctgtcaactccttgatgg

SEQ ID NO: 8326 - DNA, 20 bp, Homo Sapiens
tctgtcaactccttgatggt

SEQ ID NO: 8327 - DNA, 20 bp, Homo Sapiens
ctgtcaactccttgatggtg

SEQ ID NO: 8328 - DNA, 20 bp, Homo Sapiens
tgtcaactccttgatggtgg

SEQ ID NO: 8329 - DNA, 20 bp, Homo Sapiens
gtcaactccttgatggtggc

SEQ ID NO: 8330 - DNA, 20 bp, Homo Sapiens
tcaactccttgatggtggcc

SEQ ID NO: 8331 - DNA, 20 bp, Homo Sapiens
caactccttgatggtggcct

SEQ ID NO: 8332 - DNA, 20 bp, Homo Sapiens
aactccttgatggtggcctc

SEQ ID NO: 8333 - DNA, 20 bp, Homo Sapiens
actccttgatggtggcctct

SEQ ID NO: 8334 - DNA, 20 bp, Homo Sapiens
ctccttgatggtggcctctc

SEQ ID NO: 8335 - DNA, 20 bp, Homo Sapiens
tccttgatggtggcctctct

SEQ ID NO: 8336 - DNA, 20 bp, Homo Sapiens
ccttgatggtggcctctctg

SEQ ID NO: 8337 - DNA, 20 bp, Homo Sapiens
cttgatggtggcctctctga

SEQ ID NO: 8338 - DNA, 20 bp, Homo Sapiens
ttgatggtggcctctctgac

SEQ ID NO: 8339 - DNA, 20 bp, Homo Sapiens
tgatggtggcctctctgact

SEQ ID NO: 8340 - DNA, 20 bp, Homo Sapiens
gatggtggcctctctgactt

SEQ ID NO: 8341 - DNA, 20 bp, Homo Sapiens
atggtggcctctctgactta

SEQ ID NO: 8342 - DNA, 20 bp, Homo Sapiens
tggtggcctctctgacttac

SEQ ID NO: 8343 - DNA, 20 bp, Homo Sapiens
ggtggcctctctgacttaca

SEQ ID NO: 8344 - DNA, 20 bp, Homo Sapiens
gtggcctctctgacttacaa

SEQ ID NO: 8345 - DNA, 20 bp, Homo Sapiens
tggcctctctgacttacaaa

SEQ ID NO: 8346 - DNA, 20 bp, Homo Sapiens
ggcctctctgacttacaaag

SEQ ID NO: 8347 - DNA, 20 bp, Homo Sapiens
gcctctctgacttacaaaga

SEQ ID NO: 8348 - DNA, 20 bp, Homo Sapiens
cctctctgacttacaaagac

SEQ ID NO: 8349 - DNA, 20 bp, Homo Sapiens
ctctctgacttacaaagaca

SEQ ID NO: 8350 - DNA, 20 bp, Homo Sapiens
tctctgacttacaaagacaa

SEQ ID NO: 8351 - DNA, 20 bp, Homo Sapiens
ctctgacttacaaagacaaa

SEQ ID NO: 8352 - DNA, 20 bp, Homo Sapiens
tctgacttacaaagacaaag

SEQ ID NO: 8353 - DNA, 20 bp, Homo Sapiens
ctgacttacaaagacaaagt

SEQ ID NO: 8354 - DNA, 20 bp, Homo Sapiens
tgacttacaaagacaaagtc

SEQ ID NO: 8355 - DNA, 20 bp, Homo Sapiens
gacttacaaagacaaagtct

SEQ ID NO: 8356 - DNA, 20 bp, Homo Sapiens
acttacaaagacaaagtcta

SEQ ID NO: 8357 - DNA, 20 bp, Homo Sapiens
cttacaaagacaaagtctac

SEQ ID NO: 8358 - DNA, 20 bp, Homo Sapiens
ttacaaagacaaagtctact

SEQ ID NO: 8359 - DNA, 20 bp, Homo Sapiens
tacaaagacaaagtctactt

SEQ ID NO: 8360 - DNA, 20 bp, Homo Sapiens
acaaagacaaagtctacttg

SEQ ID NO: 8361 - DNA, 20 bp, Homo Sapiens
caaagacaaagtctacttga

SEQ ID NO: 8362 - DNA, 20 bp, Homo Sapiens
aaagacaaagtctacttgaa

SEQ ID NO: 8363 - DNA, 20 bp, Homo Sapiens
aagacaaagtctacttgaat

SEQ ID NO: 8364 - DNA, 20 bp, Homo Sapiens
agacaaagtctacttgaatg

SEQ ID NO: 8365 - DNA, 20 bp, Homo Sapiens
gacaaagtctacttgaatgt

SEQ ID NO: 8366 - DNA, 20 bp, Homo Sapiens
acaaagtctacttgaatgtg

SEQ ID NO: 8367 - DNA, 20 bp, Homo Sapiens
caaagtctacttgaatgtga

SEQ ID NO: 8368 - DNA, 20 bp, Homo Sapiens
aaagtctacttgaatgtgac

SEQ ID NO: 8369 - DNA, 20 bp, Homo Sapiens
aagtctacttgaatgtgacc

SEQ ID NO: 8370 - DNA, 20 bp, Homo Sapiens
agtctacttgaatgtgacca

SEQ ID NO: 8371 - DNA, 20 bp, Homo Sapiens
gtctacttgaatgtgaccac

SEQ ID NO: 8372 - DNA, 20 bp, Homo Sapiens
tctacttgaatgtgaccact

SEQ ID NO: 8373 - DNA, 20 bp, Homo Sapiens
ctacttgaatgtgaccactg

SEQ ID NO: 8374 - DNA, 20 bp, Homo Sapiens
tacttgaatgtgaccactga

SEQ ID NO: 8375 - DNA, 20 bp, Homo Sapiens
acttgaatgtgaccactgac

SEQ ID NO: 8376 - DNA, 20 bp, Homo Sapiens
cttgaatgtgaccactgaca

SEQ ID NO: 8377 - DNA, 20 bp, Homo Sapiens
ttgaatgtgaccactgacaa

SEQ ID NO: 8378 - DNA, 20 bp, Homo Sapiens
tgaatgtgaccactgacaat

SEQ ID NO: 8379 - DNA, 20 bp, Homo Sapiens
gaatgtgaccactgacaata

SEQ ID NO: 8380 - DNA, 20 bp, Homo Sapiens
aatgtgaccactgacaatac

SEQ ID NO: 8381 - DNA, 20 bp, Homo Sapiens
atgtgaccactgacaatacc

SEQ ID NO: 8382 - DNA, 20 bp, Homo Sapiens
tgtgaccactgacaatacct

SEQ ID NO: 8383 - DNA, 20 bp, Homo Sapiens
gtgaccactgacaatacctc

SEQ ID NO: 8384 - DNA, 20 bp, Homo Sapiens
tgaccactgacaatacctcc

SEQ ID NO: 8385 - DNA, 20 bp, Homo Sapiens
gaccactgacaatacctccc

SEQ ID NO: 8386 - DNA, 20 bp, Homo Sapiens
accactgacaatacctccct

SEQ ID NO: 8387 - DNA, 20 bp, Homo Sapiens
ccactgacaatacctccctg

SEQ ID NO: 8388 - DNA, 20 bp, Homo Sapiens
cactgacaatacctccctgg

SEQ ID NO: 8389 - DNA, 20 bp, Homo Sapiens
actgacaatacctccctgga

SEQ ID NO: 8390 - DNA, 20 bp, Homo Sapiens
ctgacaatacctccctggat

SEQ ID NO: 8391 - DNA, 20 bp, Homo Sapiens
tgacaatacctccctggatg

SEQ ID NO: 8392 - DNA, 20 bp, Homo Sapiens
gacaatacctccctggatga

SEQ ID NO: 8393 - DNA, 20 bp, Homo Sapiens
acaatacctccctggatgac

SEQ ID NO: 8394 - DNA, 20 bp, Homo Sapiens
caatacctccctggatgact

SEQ ID NO: 8395 - DNA, 20 bp, Homo Sapiens
aatacctccctggatgactt

SEQ ID NO: 8396 - DNA, 20 bp, Homo Sapiens
atacctccctggatgacttc

SEQ ID NO: 8397 - DNA, 20 bp, Homo Sapiens
tacctccctggatgacttcc

SEQ ID NO: 8398 - DNA, 20 bp, Homo Sapiens
acctccctggatgacttcca

SEQ ID NO: 8399 - DNA, 20 bp, Homo Sapiens
cctccctggatgacttccat

SEQ ID NO: 8400 - DNA, 20 bp, Homo Sapiens
ctccctggatgacttccatg

SEQ ID NO: 8401 - DNA, 20 bp, Homo Sapiens
tccctggatgacttccatgt

SEQ ID NO: 8402 - DNA, 20 bp, Homo Sapiens
ccctggatgacttccatgtg

SEQ ID NO: 8403 - DNA, 20 bp, Homo Sapiens
cctggatgacttccatgtga

SEQ ID NO: 8404 - DNA, 20 bp, Homo Sapiens
ctggatgacttccatgtgaa

SEQ ID NO: 8405 - DNA, 20 bp, Homo Sapiens
tggatgacttccatgtgaat

SEQ ID NO: 8406 - DNA, 20 bp, Homo Sapiens
ggatgacttccatgtgaatg

SEQ ID NO: 8407 - DNA, 20 bp, Homo Sapiens
gatgacttccatgtgaatgg

SEQ ID NO: 8408 - DNA, 20 bp, Homo Sapiens
atgacttccatgtgaatggc

SEQ ID NO: 8409 - DNA, 20 bp, Homo Sapiens
tgacttccatgtgaatggcg

SEQ ID NO: 8410 - DNA, 20 bp, Homo Sapiens
gacttccatgtgaatggcgg

SEQ ID NO: 8411 - DNA, 20 bp, Homo Sapiens
acttccatgtgaatggcgga

SEQ ID NO: 8412 - DNA, 20 bp, Homo Sapiens
cttccatgtgaatggcggag

SEQ ID NO: 8413 - DNA, 20 bp, Homo Sapiens
ttccatgtgaatggcggaga

SEQ ID NO: 8414 - DNA, 20 bp, Homo Sapiens
tccatgtgaatggcggagaa

SEQ ID NO: 8415 - DNA, 20 bp, Homo Sapiens
ccatgtgaatggcggagaac

SEQ ID NO: 8416 - DNA, 20 bp, Homo Sapiens
catgtgaatggcggagaact

SEQ ID NO: 8417 - DNA, 20 bp, Homo Sapiens
atgtgaatggcggagaactg

SEQ ID NO: 8418 - DNA, 20 bp, Homo Sapiens
tgtgaatggcggagaactga

SEQ ID NO: 8419 - DNA, 20 bp, Homo Sapiens
gtgaatggcggagaactgat

SEQ ID NO: 8420 - DNA, 20 bp, Homo Sapiens
tgaatggcggagaactgatt

SEQ ID NO: 8421 - DNA, 20 bp, Homo Sapiens
gaatggcggagaactgattc

SEQ ID NO: 8422 - DNA, 20 bp, Homo Sapiens
aatggcggagaactgattct

SEQ ID NO: 8423 - DNA, 20 bp, Homo Sapiens
atggcggagaactgattctt

SEQ ID NO: 8424 - DNA, 20 bp, Homo Sapiens
tggcggagaactgattctta

SEQ ID NO: 8425 - DNA, 20 bp, Homo Sapiens
ggcggagaactgattcttat

SEQ ID NO: 8426 - DNA, 20 bp, Homo Sapiens
gcggagaactgattcttatc

SEQ ID NO: 8427 - DNA, 20 bp, Homo Sapiens
cggagaactgattcttatcc

SEQ ID NO: 8428 - DNA, 20 bp, Homo Sapiens
ggagaactgattcttatcca

SEQ ID NO: 8429 - DNA, 20 bp, Homo Sapiens
gagaactgattcttatccat

SEQ ID NO: 8430 - DNA, 20 bp, Homo Sapiens
agaactgattcttatccatc

SEQ ID NO: 8431 - DNA, 20 bp, Homo Sapiens
gaactgattcttatccatca

SEQ ID NO: 8432 - DNA, 20 bp, Homo Sapiens
aactgattcttatccatcaa

SEQ ID NO: 8433 - DNA, 20 bp, Homo Sapiens
actgattcttatccatcaaa

SEQ ID NO: 8434 - DNA, 20 bp, Homo Sapiens
ctgattcttatccatcaaaa

SEQ ID NO: 8435 - DNA, 20 bp, Homo Sapiens
tgattcttatccatcaaaat

SEQ ID NO: 8436 - DNA, 20 bp, Homo Sapiens
gattcttatccatcaaaatc

SEQ ID NO: 8437 - DNA, 20 bp, Homo Sapiens
attcttatccatcaaaatcc

SEQ ID NO: 8438 - DNA, 20 bp, Homo Sapiens
ttcttatccatcaaaatcct

SEQ ID NO: 8439 - DNA, 20 bp, Homo Sapiens
tcttatccatcaaaatcctg

SEQ ID NO: 8440 - DNA, 20 bp, Homo Sapiens
cttatccatcaaaatcctgg

SEQ ID NO: 8441 - DNA, 20 bp, Homo Sapiens
ttatccatcaaaatcctggt

SEQ ID NO: 8442 - DNA, 20 bp, Homo Sapiens
tatccatcaaaatcctggtg

SEQ ID NO: 8443 - DNA, 20 bp, Homo Sapiens
atccatcaaaatcctggtga

SEQ ID NO: 8444 - DNA, 20 bp, Homo Sapiens
tccatcaaaatcctggtgaa

SEQ ID NO: 8445 - DNA, 20 bp, Homo Sapiens
ccatcaaaatcctggtgaat

SEQ ID NO: 8446 - DNA, 20 bp, Homo Sapiens
catcaaaatcctggtgaatt

SEQ ID NO: 8447 - DNA, 20 bp, Homo Sapiens
atcaaaatcctggtgaattc

SEQ ID NO: 8448 - DNA, 20 bp, Homo Sapiens
tcaaaatcctggtgaattct

SEQ ID NO: 8449 - DNA, 20 bp, Homo Sapiens
caaaatcctggtgaattctg

SEQ ID NO: 8450 - DNA, 20 bp, Homo Sapiens
aaaatcctggtgaattctgt

SEQ ID NO: 8451 - DNA, 20 bp, Homo Sapiens
aaatcctggtgaattctgtg

SEQ ID NO: 8452 - DNA, 20 bp, Homo Sapiens
aatcctggtgaattctgtgt

SEQ ID NO: 8453 - DNA, 20 bp, Homo Sapiens
atcctggtgaattctgtgtc

SEQ ID NO: 8454 - DNA, 20 bp, Homo Sapiens
tcctggtgaattctgtgtcc

SEQ ID NO: 8455 - DNA, 20 bp, Homo Sapiens
cctggtgaattctgtgtcct

SEQ ID NO: 8456 - DNA, 20 bp, Homo Sapiens
ctggtgaattctgtgtcctt

SEQ ID NO: 8457 - DNA, 20 bp, Homo Sapiens
tggtgaattctgtgtccttt

SEQ ID NO: 8458 - DNA, 20 bp, Homo Sapiens
ggtgaattctgtgtcctttg

SEQ ID NO: 8459 - DNA, 20 bp, Homo Sapiens
gtgaattctgtgtcctttga

SEQ ID NO: 8460 - DNA, 20 bp, Homo Sapiens
tgaattctgtgtcctttgag

SEQ ID NO: 8461 - DNA, 20 bp, Homo Sapiens
gaattctgtgtcctttgagg

SEQ ID NO: 8462 - DNA, 20 bp, Homo Sapiens
aattctgtgtcctttgaggg

SEQ ID NO: 8463 - DNA, 20 bp, Homo Sapiens
attctgtgtcctttgagggg

SEQ ID NO: 8464 - DNA, 20 bp, Homo Sapiens
ttctgtgtcctttgaggggc

SEQ ID NO: 8465 - DNA, 20 bp, Homo Sapiens
tctgtgtcctttgaggggct

SEQ ID NO: 8466 - DNA, 20 bp, Homo Sapiens
ctgtgtcctttgaggggctg

SEQ ID NO: 8467 - DNA, 20 bp, Homo Sapiens
tgtgtcctttgaggggctga

SEQ ID NO: 8468 - DNA, 20 bp, Homo Sapiens
gtgtcctttgaggggctgat

SEQ ID NO: 8469 - DNA, 20 bp, Homo Sapiens
tgtcctttgaggggctgatg

SEQ ID NO: 8470 - DNA, 20 bp, Homo Sapiens
gtcctttgaggggctgatgg

SEQ ID NO: 8471 - DNA, 20 bp, Homo Sapiens
tcctttgaggggctgatggc

SEQ ID NO: 8472 - DNA, 20 bp, Homo Sapiens
cctttgaggggctgatggca

SEQ ID NO: 8473 - DNA, 20 bp, Homo Sapiens
ctttgaggggctgatggcaa

SEQ ID NO: 8474 - DNA, 20 bp, Homo Sapiens
tttgaggggctgatggcaat

SEQ ID NO: 8475 - DNA, 20 bp, Homo Sapiens
ttgaggggctgatggcaata

SEQ ID NO: 8476 - DNA, 20 bp, Homo Sapiens
tgaggggctgatggcaatat

SEQ ID NO: 8477 - DNA, 20 bp, Homo Sapiens
gaggggctgatggcaatatc

SEQ ID NO: 8478 - DNA, 20 bp, Homo Sapiens
aggggctgatggcaatatct

SEQ ID NO: 8479 - DNA, 20 bp, Homo Sapiens
ggggctgatggcaatatcta

SEQ ID NO: 8480 - DNA, 20 bp, Homo Sapiens
gggctgatggcaatatctaa

SEQ ID NO: 8481 - DNA, 20 bp, Homo Sapiens
ggctgatggcaatatctaaa

SEQ ID NO: 8482 - DNA, 20 bp, Homo Sapiens
gctgatggcaatatctaaaa

SEQ ID NO: 8483 - DNA, 20 bp, Homo Sapiens
ctgatggcaatatctaaaac

SEQ ID NO: 8484 - DNA, 20 bp, Homo Sapiens
tgatggcaatatctaaaacc

SEQ ID NO: 8485 - DNA, 20 bp, Homo Sapiens
gatggcaatatctaaaacca

SEQ ID NO: 8486 - DNA, 20 bp, Homo Sapiens
atggcaatatctaaaaccag

SEQ ID NO: 8487 - DNA, 20 bp, Homo Sapiens
tggcaatatctaaaaccagg

SEQ ID NO: 8488 - DNA, 20 bp, Homo Sapiens
ggcaatatctaaaaccaggc

SEQ ID NO: 8489 - DNA, 20 bp, Homo Sapiens
gcaatatctaaaaccaggca

SEQ ID NO: 8490 - DNA, 20 bp, Homo Sapiens
caatatctaaaaccaggcac

SEQ ID NO: 8491 - DNA, 20 bp, Homo Sapiens
aatatctaaaaccaggcacc

SEQ ID NO: 8492 - DNA, 20 bp, Homo Sapiens
atatctaaaaccaggcacca

SEQ ID NO: 8493 - DNA, 20 bp, Homo Sapiens
tatctaaaaccaggcaccag

SEQ ID NO: 8494 - DNA, 20 bp, Homo Sapiens
atctaaaaccaggcaccagc

SEQ ID NO: 8495 - DNA, 20 bp, Homo Sapiens
tctaaaaccaggcaccagca

SEQ ID NO: 8496 - DNA, 20 bp, Homo Sapiens
ctaaaaccaggcaccagcat

SEQ ID NO: 8497 - DNA, 20 bp, Homo Sapiens
taaaaccaggcaccagcatg

SEQ ID NO: 8498 - DNA, 20 bp, Homo Sapiens
aaaaccaggcaccagcatga

SEQ ID NO: 8499 - DNA, 20 bp, Homo Sapiens
aaaccaggcaccagcatgaa

SEQ ID NO: 8500 - DNA, 20 bp, Homo Sapiens
aaccaggcaccagcatgaac

SEQ ID NO: 8501 - DNA, 20 bp, Homo Sapiens
accaggcaccagcatgaaca

SEQ ID NO: 8502 - DNA, 20 bp, Homo Sapiens
ccaggcaccagcatgaacac

SEQ ID NO: 8503 - DNA, 20 bp, Homo Sapiens
caggcaccagcatgaacacc

SEQ ID NO: 8504 - DNA, 20 bp, Homo Sapiens
aggcaccagcatgaacacca

SEQ ID NO: 8505 - DNA, 20 bp, Homo Sapiens
ggcaccagcatgaacaccaa

SEQ ID NO: 8506 - DNA, 20 bp, Homo Sapiens
gcaccagcatgaacaccaag

SEQ ID NO: 8507 - DNA, 20 bp, Homo Sapiens
caccagcatgaacaccaagc

SEQ ID NO: 8508 - DNA, 20 bp, Homo Sapiens
accagcatgaacaccaagct

SEQ ID NO: 8509 - DNA, 20 bp, Homo Sapiens
ccagcatgaacaccaagctg

SEQ ID NO: 8510 - DNA, 20 bp, Homo Sapiens
cagcatgaacaccaagctgg

SEQ ID NO: 8511 - DNA, 20 bp, Homo Sapiens
agcatgaacaccaagctggg

SEQ ID NO: 8512 - DNA, 20 bp, Homo Sapiens
gcatgaacaccaagctgggg

SEQ ID NO: 8513 - DNA, 20 bp, Homo Sapiens
catgaacaccaagctggggg

SEQ ID NO: 8514 - DNA, 20 bp, Homo Sapiens
atgaacaccaagctgggggt

SEQ ID NO: 8515 - DNA, 20 bp, Homo Sapiens
tgaacaccaagctgggggtg

SEQ ID NO: 8516 - DNA, 20 bp, Homo Sapiens
gaacaccaagctgggggtgg

SEQ ID NO: 8517 - DNA, 20 bp, Homo Sapiens
aacaccaagctgggggtgga

SEQ ID NO: 8518 - DNA, 20 bp, Homo Sapiens
acaccaagctgggggtggac

SEQ ID NO: 8519 - DNA, 20 bp, Homo Sapiens
caccaagctgggggtggaca

SEQ ID NO: 8520 - DNA, 20 bp, Homo Sapiens
accaagctgggggtggacag

SEQ ID NO: 8521 - DNA, 20 bp, Homo Sapiens
ccaagctgggggtggacagg

SEQ ID NO: 8522 - DNA, 20 bp, Homo Sapiens
caagctgggggtggacaggg

SEQ ID NO: 8523 - DNA, 20 bp, Homo Sapiens
aagctgggggtggacagggc

SEQ ID NO: 8524 - DNA, 20 bp, Homo Sapiens
agctgggggtggacagggca

SEQ ID NO: 8525 - DNA, 20 bp, Homo Sapiens
gctgggggtggacagggcat

SEQ ID NO: 8526 - DNA, 20 bp, Homo Sapiens
ctgggggtggacagggcatg

SEQ ID NO: 8527 - DNA, 20 bp, Homo Sapiens
tgggggtggacagggcatgg

SEQ ID NO: 8528 - DNA, 20 bp, Homo Sapiens
gggggtggacagggcatgga

SEQ ID NO: 8529 - DNA, 20 bp, Homo Sapiens
ggggtggacagggcatggat

SEQ ID NO: 8530 - DNA, 20 bp, Homo Sapiens
gggtggacagggcatggatt

SEQ ID NO: 8531 - DNA, 20 bp, Homo Sapiens
ggtggacagggcatggattc

SEQ ID NO: 8532 - DNA, 20 bp, Homo Sapiens
gtggacagggcatggattct

SEQ ID NO: 8533 - DNA, 20 bp, Homo Sapiens
tggacagggcatggattctt

SEQ ID NO: 8534 - DNA, 20 bp, Homo Sapiens
ggacagggcatggattcttc

SEQ ID NO: 8535 - DNA, 20 bp, Homo Sapiens
gacagggcatggattcttca

SEQ ID NO: 8536 - DNA, 20 bp, Homo Sapiens
acagggcatggattcttcat

SEQ ID NO: 8537 - DNA, 20 bp, Homo Sapiens
cagggcatggattcttcatt

SEQ ID NO: 8538 - DNA, 20 bp, Homo Sapiens
agggcatggattcttcattg

SEQ ID NO: 8539 - DNA, 20 bp, Homo Sapiens
gggcatggattcttcattgc

SEQ ID NO: 8540 - DNA, 20 bp, Homo Sapiens
ggcatggattcttcattgca

SEQ ID NO: 8541 - DNA, 20 bp, Homo Sapiens
gcatggattcttcattgcaa

SEQ ID NO: 8542 - DNA, 20 bp, Homo Sapiens
catggattcttcattgcaag

SEQ ID NO: 8543 - DNA, 20 bp, Homo Sapiens
atggattcttcattgcaagt

SEQ ID NO: 8544 - DNA, 20 bp, Homo Sapiens
tggattcttcattgcaagtg

SEQ ID NO: 8545 - DNA, 20 bp, Homo Sapiens
ggattcttcattgcaagtga

SEQ ID NO: 8546 - DNA, 20 bp, Homo Sapiens
gattcttcattgcaagtgaa

SEQ ID NO: 8547 - DNA, 20 bp, Homo Sapiens
attcttcattgcaagtgaag

SEQ ID NO: 8548 - DNA, 20 bp, Homo Sapiens
ttcttcattgcaagtgaagg

SEQ ID NO: 8549 - DNA, 20 bp, Homo Sapiens
tcttcattgcaagtgaagga

SEQ ID NO: 8550 - DNA, 20 bp, Homo Sapiens
cttcattgcaagtgaaggag

SEQ ID NO: 8551 - DNA, 20 bp, Homo Sapiens
ttcattgcaagtgaaggagc

SEQ ID NO: 8552 - DNA, 20 bp, Homo Sapiens
tcattgcaagtgaaggagcc

SEQ ID NO: 8553 - DNA, 20 bp, Homo Sapiens
cattgcaagtgaaggagcct

SEQ ID NO: 8554 - DNA, 20 bp, Homo Sapiens
attgcaagtgaaggagcctc

SEQ ID NO: 8555 - DNA, 20 bp, Homo Sapiens
ttgcaagtgaaggagcctcc

SEQ ID NO: 8556 - DNA, 20 bp, Homo Sapiens
tgcaagtgaaggagcctccc

SEQ ID NO: 8557 - DNA, 20 bp, Homo Sapiens
gcaagtgaaggagcctccca

SEQ ID NO: 8558 - DNA, 20 bp, Homo Sapiens
caagtgaaggagcctcccag

SEQ ID NO: 8559 - DNA, 20 bp, Homo Sapiens
aagtgaaggagcctcccagc

SEQ ID NO: 8560 - DNA, 20 bp, Homo Sapiens
agtgaaggagcctcccagct

SEQ ID NO: 8561 - DNA, 20 bp, Homo Sapiens
gtgaaggagcctcccagctc

SEQ ID NO: 8562 - DNA, 20 bp, Homo Sapiens
tgaaggagcctcccagctca

SEQ ID NO: 8563 - DNA, 20 bp, Homo Sapiens
gaaggagcctcccagctcag

SEQ ID NO: 8564 - DNA, 20 bp, Homo Sapiens
aaggagcctcccagctcagc

SEQ ID NO: 8565 - DNA, 20 bp, Homo Sapiens
aggagcctcccagctcagcc

SEQ ID NO: 8566 - DNA, 20 bp, Homo Sapiens
ggagcctcccagctcagcca

SEQ ID NO: 8567 - DNA, 20 bp, Homo Sapiens
gagcctcccagctcagccac

SEQ ID NO: 8568 - DNA, 20 bp, Homo Sapiens
agcctcccagctcagccacg

SEQ ID NO: 8569 - DNA, 20 bp, Homo Sapiens
gcctcccagctcagccacgt

SEQ ID NO: 8570 - DNA, 20 bp, Homo Sapiens
cctcccagctcagccacgtg

SEQ ID NO: 8571 - DNA, 20 bp, Homo Sapiens
ctcccagctcagccacgtgg

SEQ ID NO: 8572 - DNA, 20 bp, Homo Sapiens
tcccagctcagccacgtggg

SEQ ID NO: 8573 - DNA, 20 bp, Homo Sapiens
cccagctcagccacgtggga

SEQ ID NO: 8574 - DNA, 20 bp, Homo Sapiens
ccagctcagccacgtgggat

SEQ ID NO: 8575 - DNA, 20 bp, Homo Sapiens
cagctcagccacgtgggatg

SEQ ID NO: 8576 - DNA, 20 bp, Homo Sapiens
agctcagccacgtgggatgt

SEQ ID NO: 8577 - DNA, 20 bp, Homo Sapiens
gctcagccacgtgggatgtg

SEQ ID NO: 8578 - DNA, 20 bp, Homo Sapiens
ctcagccacgtgggatgtga

SEQ ID NO: 8579 - DNA, 20 bp, Homo Sapiens
tcagccacgtgggatgtgac

SEQ ID NO: 8580 - DNA, 20 bp, Homo Sapiens
cagccacgtgggatgtgaca

SEQ ID NO: 8581 - DNA, 20 bp, Homo Sapiens
agccacgtgggatgtgacaa

SEQ ID NO: 8582 - DNA, 20 bp, Homo Sapiens
gccacgtgggatgtgacaag

SEQ ID NO: 8583 - DNA, 20 bp, Homo Sapiens
ccacgtgggatgtgacaaga

SEQ ID NO: 8584 - DNA, 20 bp, Homo Sapiens
cacgtgggatgtgacaagaa

SEQ ID NO: 8585 - DNA, 20 bp, Homo Sapiens
acgtgggatgtgacaagaag

SEQ ID NO: 8586 - DNA, 20 bp, Homo Sapiens
cgtgggatgtgacaagaagc

SEQ ID NO: 8587 - DNA, 20 bp, Homo Sapiens
gtgggatgtgacaagaagca

SEQ ID NO: 8588 - DNA, 20 bp, Homo Sapiens
tgggatgtgacaagaagcag

SEQ ID NO: 8589 - DNA, 20 bp, Homo Sapiens
gggatgtgacaagaagcaga

SEQ ID NO: 8590 - DNA, 20 bp, Homo Sapiens
ggatgtgacaagaagcagat

SEQ ID NO: 8591 - DNA, 20 bp, Homo Sapiens
gatgtgacaagaagcagatc

SEQ ID NO: 8592 - DNA, 20 bp, Homo Sapiens
atgtgacaagaagcagatcc

SEQ ID NO: 8593 - DNA, 20 bp, Homo Sapiens
tgtgacaagaagcagatcct

SEQ ID NO: 8594 - DNA, 20 bp, Homo Sapiens
gtgacaagaagcagatcctg

SEQ ID NO: 8595 - DNA, 20 bp, Homo Sapiens
tgacaagaagcagatcctgg

SEQ ID NO: 8596 - DNA, 20 bp, Homo Sapiens
gacaagaagcagatcctggc

SEQ ID NO: 8597 - DNA, 20 bp, Homo Sapiens
acaagaagcagatcctggcc

SEQ ID NO: 8598 - DNA, 20 bp, Homo Sapiens
caagaagcagatcctggccc

SEQ ID NO: 8599 - DNA, 20 bp, Homo Sapiens
aagaagcagatcctggccct

SEQ ID NO: 8600 - DNA, 20 bp, Homo Sapiens
agaagcagatcctggccctc

SEQ ID NO: 8601 - DNA, 20 bp, Homo Sapiens
gaagcagatcctggccctcc

SEQ ID NO: 8602 - DNA, 20 bp, Homo Sapiens
aagcagatcctggccctccc

SEQ ID NO: 8603 - DNA, 20 bp, Homo Sapiens
agcagatcctggccctcccg

SEQ ID NO: 8604 - DNA, 20 bp, Homo Sapiens
gcagatcctggccctcccgc

SEQ ID NO: 8605 - DNA, 20 bp, Homo Sapiens
cagatcctggccctcccgcc

SEQ ID NO: 8606 - DNA, 20 bp, Homo Sapiens
agatcctggccctcccgccc

SEQ ID NO: 8607 - DNA, 20 bp, Homo Sapiens
gatcctggccctcccgcccc

SEQ ID NO: 8608 - DNA, 20 bp, Homo Sapiens
atcctggccctcccgccccc

SEQ ID NO: 8609 - DNA, 20 bp, Homo Sapiens
tcctggccctcccgccccca

SEQ ID NO: 8610 - DNA, 20 bp, Homo Sapiens
cctggccctcccgcccccac

SEQ ID NO: 8611 - DNA, 20 bp, Homo Sapiens
ctggccctcccgcccccacc

SEQ ID NO: 8612 - DNA, 20 bp, Homo Sapiens
tggccctcccgcccccaccc

SEQ ID NO: 8613 - DNA, 20 bp, Homo Sapiens
ggccctcccgcccccacccc

SEQ ID NO: 8614 - DNA, 20 bp, Homo Sapiens
gccctcccgcccccacccct

SEQ ID NO: 8615 - DNA, 20 bp, Homo Sapiens
ccctcccgcccccacccctc

SEQ ID NO: 8616 - DNA, 20 bp, Homo Sapiens
cctcccgcccccacccctca

SEQ ID NO: 8617 - DNA, 20 bp, Homo Sapiens
ctcccgcccccacccctcag

SEQ ID NO: 8618 - DNA, 20 bp, Homo Sapiens
tcccgcccccacccctcagg

SEQ ID NO: 8619 - DNA, 20 bp, Homo Sapiens
cccgcccccacccctcaggg

SEQ ID NO: 8620 - DNA, 20 bp, Homo Sapiens
ccgcccccacccctcaggga

SEQ ID NO: 8621 - DNA, 20 bp, Homo Sapiens
cgcccccacccctcagggat

SEQ ID NO: 8622 - DNA, 20 bp, Homo Sapiens
gcccccacccctcagggata

SEQ ID NO: 8623 - DNA, 20 bp, Homo Sapiens
cccccacccctcagggatat

SEQ ID NO: 8624 - DNA, 20 bp, Homo Sapiens
ccccacccctcagggatatt

SEQ ID NO: 8625 - DNA, 20 bp, Homo Sapiens
cccacccctcagggatattt

SEQ ID NO: 8626 - DNA, 20 bp, Homo Sapiens
ccacccctcagggatattta

SEQ ID NO: 8627 - DNA, 20 bp, Homo Sapiens
cacccctcagggatatttaa

SEQ ID NO: 8628 - DNA, 20 bp, Homo Sapiens
acccctcagggatatttaaa

SEQ ID NO: 8629 - DNA, 20 bp, Homo Sapiens
cccctcagggatatttaaaa

SEQ ID NO: 8630 - DNA, 20 bp, Homo Sapiens
ccctcagggatatttaaaac

SEQ ID NO: 8631 - DNA, 20 bp, Homo Sapiens
cctcagggatatttaaaact

SEQ ID NO: 8632 - DNA, 20 bp, Homo Sapiens
ctcagggatatttaaaactt

SEQ ID NO: 8633 - DNA, 20 bp, Homo Sapiens
tcagggatatttaaaactta

SEQ ID NO: 8634 - DNA, 20 bp, Homo Sapiens
cagggatatttaaaacttat

SEQ ID NO: 8635 - DNA, 20 bp, Homo Sapiens
agggatatttaaaacttatt

SEQ ID NO: 8636 - DNA, 20 bp, Homo Sapiens
gggatatttaaaacttattt

SEQ ID NO: 8637 - DNA, 20 bp, Homo Sapiens
ggatatttaaaacttatttt

SEQ ID NO: 8638 - DNA, 20 bp, Homo Sapiens
gatatttaaaacttatttta

SEQ ID NO: 8639 - DNA, 20 bp, Homo Sapiens
atatttaaaacttattttat

SEQ ID NO: 8640 - DNA, 20 bp, Homo Sapiens
tatttaaaacttattttata

SEQ ID NO: 8641 - DNA, 20 bp, Homo Sapiens
atttaaaacttattttatat

SEQ ID NO: 8642 - DNA, 20 bp, Homo Sapiens
tttaaaacttattttatata

SEQ ID NO: 8643 - DNA, 20 bp, Homo Sapiens
ttaaaacttattttatatac

SEQ ID NO: 8644 - DNA, 20 bp, Homo Sapiens
taaaacttattttatatacc

SEQ ID NO: 8645 - DNA, 20 bp, Homo Sapiens
aaaacttattttatatacca

SEQ ID NO: 8646 - DNA, 20 bp, Homo Sapiens
aaacttattttatataccag

SEQ ID NO: 8647 - DNA, 20 bp, Homo Sapiens
aacttattttatataccagt

SEQ ID NO: 8648 - DNA, 20 bp, Homo Sapiens
acttattttatataccagtt

SEQ ID NO: 8649 - DNA, 20 bp, Homo Sapiens
cttattttatataccagtta

SEQ ID NO: 8650 - DNA, 20 bp, Homo Sapiens
ttattttatataccagttaa

SEQ ID NO: 8651 - DNA, 20 bp, Homo Sapiens
tattttatataccagttaat

SEQ ID NO: 8652 - DNA, 20 bp, Homo Sapiens
attttatataccagttaatc

SEQ ID NO: 8653 - DNA, 20 bp, Homo Sapiens
ttttatataccagttaatct

SEQ ID NO: 8654 - DNA, 20 bp, Homo Sapiens
tttatataccagttaatctt

SEQ ID NO: 8655 - DNA, 20 bp, Homo Sapiens
ttatataccagttaatctta

SEQ ID NO: 8656 - DNA, 20 bp, Homo Sapiens
tatataccagttaatcttat

SEQ ID NO: 8657 - DNA, 20 bp, Homo Sapiens
atataccagttaatcttatt

SEQ ID NO: 8658 - DNA, 20 bp, Homo Sapiens
tataccagttaatcttattt

SEQ ID NO: 8659 - DNA, 20 bp, Homo Sapiens
ataccagttaatcttattta

SEQ ID NO: 8660 - DNA, 20 bp, Homo Sapiens
taccagttaatcttatttat

SEQ ID NO: 8661 - DNA, 20 bp, Homo Sapiens
accagttaatcttatttatc

SEQ ID NO: 8662 - DNA, 20 bp, Homo Sapiens
ccagttaatcttatttatcc

SEQ ID NO: 8663 - DNA, 20 bp, Homo Sapiens
cagttaatcttatttatcct

SEQ ID NO: 8664 - DNA, 20 bp, Homo Sapiens
agttaatcttatttatcctt

SEQ ID NO: 8665 - DNA, 20 bp, Homo Sapiens
gttaatcttatttatcctta

SEQ ID NO: 8666 - DNA, 20 bp, Homo Sapiens
ttaatcttatttatccttat

SEQ ID NO: 8667 - DNA, 20 bp, Homo Sapiens
taatcttatttatccttata

SEQ ID NO: 8668 - DNA, 20 bp, Homo Sapiens
aatcttatttatccttatat

SEQ ID NO: 8669 - DNA, 20 bp, Homo Sapiens
atcttatttatccttatatt

SEQ ID NO: 8670 - DNA, 20 bp, Homo Sapiens
tcttatttatccttatattt

SEQ ID NO: 8671 - DNA, 20 bp, Homo Sapiens
cttatttatccttatatttt

SEQ ID NO: 8672 - DNA, 20 bp, Homo Sapiens
ttatttatccttatattttc

SEQ ID NO: 8673 - DNA, 20 bp, Homo Sapiens
tatttatccttatattttct

SEQ ID NO: 8674 - DNA, 20 bp, Homo Sapiens
atttatccttatattttcta

SEQ ID NO: 8675 - DNA, 20 bp, Homo Sapiens
tttatccttatattttctaa

SEQ ID NO: 8676 - DNA, 20 bp, Homo Sapiens
ttatccttatattttctaaa

SEQ ID NO: 8677 - DNA, 20 bp, Homo Sapiens
tatccttatattttctaaat

SEQ ID NO: 8678 - DNA, 20 bp, Homo Sapiens
atccttatattttctaaatt

SEQ ID NO: 8679 - DNA, 20 bp, Homo Sapiens
tccttatattttctaaattg

SEQ ID NO: 8680 - DNA, 20 bp, Homo Sapiens
ccttatattttctaaattgc

SEQ ID NO: 8681 - DNA, 20 bp, Homo Sapiens
cttatattttctaaattgcc

SEQ ID NO: 8682 - DNA, 20 bp, Homo Sapiens
ttatattttctaaattgcct

SEQ ID NO: 8683 - DNA, 20 bp, Homo Sapiens
tatattttctaaattgccta

SEQ ID NO: 8684 - DNA, 20 bp, Homo Sapiens
atattttctaaattgcctag

SEQ ID NO: 8685 - DNA, 20 bp, Homo Sapiens
tattttctaaattgcctagc

SEQ ID NO: 8686 - DNA, 20 bp, Homo Sapiens
attttctaaattgcctagcc

SEQ ID NO: 8687 - DNA, 20 bp, Homo Sapiens
ttttctaaattgcctagccg

SEQ ID NO: 8688 - DNA, 20 bp, Homo Sapiens
tttctaaattgcctagccgt

SEQ ID NO: 8689 - DNA, 20 bp, Homo Sapiens
ttctaaattgcctagccgtc

SEQ ID NO: 8690 - DNA, 20 bp, Homo Sapiens
tctaaattgcctagccgtca

SEQ ID NO: 8691 - DNA, 20 bp, Homo Sapiens
ctaaattgcctagccgtcac

SEQ ID NO: 8692 - DNA, 20 bp, Homo Sapiens
taaattgcctagccgtcaca

SEQ ID NO: 8693 - DNA, 20 bp, Homo Sapiens
aaattgcctagccgtcacac

SEQ ID NO: 8694 - DNA, 20 bp, Homo Sapiens
aattgcctagccgtcacacc

SEQ ID NO: 8695 - DNA, 20 bp, Homo Sapiens
attgcctagccgtcacaccc

SEQ ID NO: 8696 - DNA, 20 bp, Homo Sapiens
ttgcctagccgtcacacccc

SEQ ID NO: 8697 - DNA, 20 bp, Homo Sapiens
tgcctagccgtcacacccca

SEQ ID NO: 8698 - DNA, 20 bp, Homo Sapiens
gcctagccgtcacaccccaa

SEQ ID NO: 8699 - DNA, 20 bp, Homo Sapiens
cctagccgtcacaccccaag

SEQ ID NO: 8700 - DNA, 20 bp, Homo Sapiens
ctagccgtcacaccccaaga

SEQ ID NO: 8701 - DNA, 20 bp, Homo Sapiens
tagccgtcacaccccaagat

SEQ ID NO: 8702 - DNA, 20 bp, Homo Sapiens
agccgtcacaccccaagatt

SEQ ID NO: 8703 - DNA, 20 bp, Homo Sapiens
gccgtcacaccccaagattg

SEQ ID NO: 8704 - DNA, 20 bp, Homo Sapiens
ccgtcacaccccaagattgc

SEQ ID NO: 8705 - DNA, 20 bp, Homo Sapiens
cgtcacaccccaagattgcc

SEQ ID NO: 8706 - DNA, 20 bp, Homo Sapiens
gtcacaccccaagattgcct

SEQ ID NO: 8707 - DNA, 20 bp, Homo Sapiens
tcacaccccaagattgcctt

SEQ ID NO: 8708 - DNA, 20 bp, Homo Sapiens
cacaccccaagattgccttg

SEQ ID NO: 8709 - DNA, 20 bp, Homo Sapiens
acaccccaagattgccttga

SEQ ID NO: 8710 - DNA, 20 bp, Homo Sapiens
caccccaagattgccttgag

SEQ ID NO: 8711 - DNA, 20 bp, Homo Sapiens
accccaagattgccttgagc

SEQ ID NO: 8712 - DNA, 20 bp, Homo Sapiens
ccccaagattgccttgagcc

SEQ ID NO: 8713 - DNA, 20 bp, Homo Sapiens
cccaagattgccttgagcct

SEQ ID NO: 8714 - DNA, 20 bp, Homo Sapiens
ccaagattgccttgagccta

SEQ ID NO: 8715 - DNA, 20 bp, Homo Sapiens
caagattgccttgagcctac

SEQ ID NO: 8716 - DNA, 20 bp, Homo Sapiens
aagattgccttgagcctact

SEQ ID NO: 8717 - DNA, 20 bp, Homo Sapiens
agattgccttgagcctacta

SEQ ID NO: 8718 - DNA, 20 bp, Homo Sapiens
gattgccttgagcctactag

SEQ ID NO: 8719 - DNA, 20 bp, Homo Sapiens
attgccttgagcctactagg

SEQ ID NO: 8720 - DNA, 20 bp, Homo Sapiens
ttgccttgagcctactaggc

SEQ ID NO: 8721 - DNA, 20 bp, Homo Sapiens
tgccttgagcctactaggca

SEQ ID NO: 8722 - DNA, 20 bp, Homo Sapiens
gccttgagcctactaggcac

SEQ ID NO: 8723 - DNA, 20 bp, Homo Sapiens
ccttgagcctactaggcacc

SEQ ID NO: 8724 - DNA, 20 bp, Homo Sapiens
cttgagcctactaggcacct

SEQ ID NO: 8725 - DNA, 20 bp, Homo Sapiens
ttgagcctactaggcacctt

SEQ ID NO: 8726 - DNA, 20 bp, Homo Sapiens
tgagcctactaggcaccttt

SEQ ID NO: 8727 - DNA, 20 bp, Homo Sapiens
gagcctactaggcacctttg

SEQ ID NO: 8728 - DNA, 20 bp, Homo Sapiens
agcctactaggcacctttgt

SEQ ID NO: 8729 - DNA, 20 bp, Homo Sapiens
gcctactaggcacctttgtg

SEQ ID NO: 8730 - DNA, 20 bp, Homo Sapiens
cctactaggcacctttgtga

SEQ ID NO: 8731 - DNA, 20 bp, Homo Sapiens
ctactaggcacctttgtgag

SEQ ID NO: 8732 - DNA, 20 bp, Homo Sapiens
tactaggcacctttgtgaga

SEQ ID NO: 8733 - DNA, 20 bp, Homo Sapiens
actaggcacctttgtgagaa

SEQ ID NO: 8734 - DNA, 20 bp, Homo Sapiens
ctaggcacctttgtgagaaa

SEQ ID NO: 8735 - DNA, 20 bp, Homo Sapiens
taggcacctttgtgagaaag

SEQ ID NO: 8736 - DNA, 20 bp, Homo Sapiens
aggcacctttgtgagaaaga

SEQ ID NO: 8737 - DNA, 20 bp, Homo Sapiens
ggcacctttgtgagaaagaa

SEQ ID NO: 8738 - DNA, 20 bp, Homo Sapiens
gcacctttgtgagaaagaaa

SEQ ID NO: 8739 - DNA, 20 bp, Homo Sapiens
cacctttgtgagaaagaaaa

SEQ ID NO: 8740 - DNA, 20 bp, Homo Sapiens
acctttgtgagaaagaaaaa

SEQ ID NO: 8741 - DNA, 20 bp, Homo Sapiens
cctttgtgagaaagaaaaaa

SEQ ID NO: 8742 - DNA, 20 bp, Homo Sapiens
ctttgtgagaaagaaaaaat

SEQ ID NO: 8743 - DNA, 20 bp, Homo Sapiens
tttgtgagaaagaaaaaata

SEQ ID NO: 8744 - DNA, 20 bp, Homo Sapiens
ttgtgagaaagaaaaaatag

SEQ ID NO: 8745 - DNA, 20 bp, Homo Sapiens
tgtgagaaagaaaaaataga

SEQ ID NO: 8746 - DNA, 20 bp, Homo Sapiens
gtgagaaagaaaaaatagat

SEQ ID NO: 8747 - DNA, 20 bp, Homo Sapiens
tgagaaagaaaaaatagatg

SEQ ID NO: 8748 - DNA, 20 bp, Homo Sapiens
gagaaagaaaaaatagatgc

SEQ ID NO: 8749 - DNA, 20 bp, Homo Sapiens
agaaagaaaaaatagatgcc

SEQ ID NO: 8750 - DNA, 20 bp, Homo Sapiens
gaaagaaaaaatagatgcct

SEQ ID NO: 8751 - DNA, 20 bp, Homo Sapiens
aaagaaaaaatagatgcctc

SEQ ID NO: 8752 - DNA, 20 bp, Homo Sapiens
aagaaaaaatagatgcctct

SEQ ID NO: 8753 - DNA, 20 bp, Homo Sapiens
agaaaaaatagatgcctctt

SEQ ID NO: 8754 - DNA, 20 bp, Homo Sapiens
gaaaaaatagatgcctcttc

SEQ ID NO: 8755 - DNA, 20 bp, Homo Sapiens
aaaaaatagatgcctcttct

SEQ ID NO: 8756 - DNA, 20 bp, Homo Sapiens
aaaaatagatgcctcttctt

SEQ ID NO: 8757 - DNA, 20 bp, Homo Sapiens
aaaatagatgcctcttcttc

SEQ ID NO: 8758 - DNA, 20 bp, Homo Sapiens
aaatagatgcctcttcttca

SEQ ID NO: 8759 - DNA, 20 bp, Homo Sapiens
aatagatgcctcttcttcaa

SEQ ID NO: 8760 - DNA, 20 bp, Homo Sapiens
atagatgcctcttcttcaag

SEQ ID NO: 8761 - DNA, 20 bp, Homo Sapiens
tagatgcctcttcttcaaga

SEQ ID NO: 8762 - DNA, 20 bp, Homo Sapiens
agatgcctcttcttcaagat

SEQ ID NO: 8763 - DNA, 20 bp, Homo Sapiens
gatgcctcttcttcaagatg

SEQ ID NO: 8764 - DNA, 20 bp, Homo Sapiens
atgcctcttcttcaagatgc

SEQ ID NO: 8765 - DNA, 20 bp, Homo Sapiens
tgcctcttcttcaagatgca

SEQ ID NO: 8766 - DNA, 20 bp, Homo Sapiens
gcctcttcttcaagatgcat

SEQ ID NO: 8767 - DNA, 20 bp, Homo Sapiens
cctcttcttcaagatgcatt

SEQ ID NO: 8768 - DNA, 20 bp, Homo Sapiens
ctcttcttcaagatgcattg

SEQ ID NO: 8769 - DNA, 20 bp, Homo Sapiens
tcttcttcaagatgcattgt

SEQ ID NO: 8770 - DNA, 20 bp, Homo Sapiens
cttcttcaagatgcattgtt

SEQ ID NO: 8771 - DNA, 20 bp, Homo Sapiens
ttcttcaagatgcattgttt

SEQ ID NO: 8772 - DNA, 20 bp, Homo Sapiens
tcttcaagatgcattgtttc

SEQ ID NO: 8773 - DNA, 20 bp, Homo Sapiens
cttcaagatgcattgtttct

SEQ ID NO: 8774 - DNA, 20 bp, Homo Sapiens
ttcaagatgcattgtttcta

SEQ ID NO: 8775 - DNA, 20 bp, Homo Sapiens
tcaagatgcattgtttctat

SEQ ID NO: 8776 - DNA, 20 bp, Homo Sapiens
caagatgcattgtttctatt

SEQ ID NO: 8777 - DNA, 20 bp, Homo Sapiens
aagatgcattgtttctattg

SEQ ID NO: 8778 - DNA, 20 bp, Homo Sapiens
agatgcattgtttctattgg

SEQ ID NO: 8779 - DNA, 20 bp, Homo Sapiens
gatgcattgtttctattggt

SEQ ID NO: 8780 - DNA, 20 bp, Homo Sapiens
atgcattgtttctattggtc

SEQ ID NO: 8781 - DNA, 20 bp, Homo Sapiens
tgcattgtttctattggtca

SEQ ID NO: 8782 - DNA, 20 bp, Homo Sapiens
gcattgtttctattggtcag

SEQ ID NO: 8783 - DNA, 20 bp, Homo Sapiens
cattgtttctattggtcagg

SEQ ID NO: 8784 - DNA, 20 bp, Homo Sapiens
attgtttctattggtcaggc

SEQ ID NO: 8785 - DNA, 20 bp, Homo Sapiens
ttgtttctattggtcaggca

SEQ ID NO: 8786 - DNA, 20 bp, Homo Sapiens
tgtttctattggtcaggcaa

SEQ ID NO: 8787 - DNA, 20 bp, Homo Sapiens
gtttctattggtcaggcaat

SEQ ID NO: 8788 - DNA, 20 bp, Homo Sapiens
tttctattggtcaggcaatt

SEQ ID NO: 8789 - DNA, 20 bp, Homo Sapiens
ttctattggtcaggcaattg

SEQ ID NO: 8790 - DNA, 20 bp, Homo Sapiens
tctattggtcaggcaattgt

SEQ ID NO: 8791 - DNA, 20 bp, Homo Sapiens
ctattggtcaggcaattgtc

SEQ ID NO: 8792 - DNA, 20 bp, Homo Sapiens
tattggtcaggcaattgtca

SEQ ID NO: 8793 - DNA, 20 bp, Homo Sapiens
attggtcaggcaattgtcat

SEQ ID NO: 8794 - DNA, 20 bp, Homo Sapiens
ttggtcaggcaattgtcata

SEQ ID NO: 8795 - DNA, 20 bp, Homo Sapiens
tggtcaggcaattgtcataa

SEQ ID NO: 8796 - DNA, 20 bp, Homo Sapiens
ggtcaggcaattgtcataat

SEQ ID NO: 8797 - DNA, 20 bp, Homo Sapiens
gtcaggcaattgtcataata

SEQ ID NO: 8798 - DNA, 20 bp, Homo Sapiens
tcaggcaattgtcataataa

SEQ ID NO: 8799 - DNA, 20 bp, Homo Sapiens
caggcaattgtcataataaa

SEQ ID NO: 8800 - DNA, 20 bp, Homo Sapiens
aggcaattgtcataataaac

SEQ ID NO: 8801 - DNA, 20 bp, Homo Sapiens
ggcaattgtcataataaact

SEQ ID NO: 8802 - DNA, 20 bp, Homo Sapiens
gcaattgtcataataaactt

SEQ ID NO: 8803 - DNA, 20 bp, Homo Sapiens
caattgtcataataaactta

SEQ ID NO: 8804 - DNA, 20 bp, Homo Sapiens
aattgtcataataaacttat

SEQ ID NO: 8805 - DNA, 20 bp, Homo Sapiens
attgtcataataaacttatg

SEQ ID NO: 8806 - DNA, 20 bp, Homo Sapiens
ttgtcataataaacttatgt

SEQ ID NO: 8807 - DNA, 20 bp, Homo Sapiens
tgtcataataaacttatgtc

SEQ ID NO: 8808 - DNA, 20 bp, Homo Sapiens
gtcataataaacttatgtca

SEQ ID NO: 8809 - DNA, 20 bp, Homo Sapiens
tcataataaacttatgtcat

SEQ ID NO: 8810 - DNA, 20 bp, Homo Sapiens
cataataaacttatgtcatt

SEQ ID NO: 8811 - DNA, 20 bp, Homo Sapiens
ataataaacttatgtcattg

SEQ ID NO: 8812 - DNA, 20 bp, Homo Sapiens
taataaacttatgtcattga

SEQ ID NO: 8813 - DNA, 20 bp, Homo Sapiens
aataaacttatgtcattgaa

SEQ ID NO: 8814 - DNA, 20 bp, Homo Sapiens
ataaacttatgtcattgaaa

SEQ ID NO: 8815 - DNA, 20 bp, Homo Sapiens
taaacttatgtcattgaaaa

SEQ ID NO: 8816 - DNA, 20 bp, Homo Sapiens
aaacttatgtcattgaaaac

SEQ ID NO: 8817 - DNA, 20 bp, Homo Sapiens
aacttatgtcattgaaaacg

SEQ ID NO: 8818 - DNA, 20 bp, Homo Sapiens
acttatgtcattgaaaacgg

SEQ ID NO: 8819 - DNA, 20 bp, Homo Sapiens
cttatgtcattgaaaacggt

SEQ ID NO: 8820 - DNA, 20 bp, Homo Sapiens
ttatgtcattgaaaacggta

SEQ ID NO: 8821 - DNA, 20 bp, Homo Sapiens
tatgtcattgaaaacggtac

SEQ ID NO: 8822 - DNA, 20 bp, Homo Sapiens
atgtcattgaaaacggtacc

SEQ ID NO: 8823 - DNA, 20 bp, Homo Sapiens
tgtcattgaaaacggtacct

SEQ ID NO: 8824 - DNA, 20 bp, Homo Sapiens
gtcattgaaaacggtacctg

SEQ ID NO: 8825 - DNA, 20 bp, Homo Sapiens
tcattgaaaacggtacctga

SEQ ID NO: 8826 - DNA, 20 bp, Homo Sapiens
cattgaaaacggtacctgac

SEQ ID NO: 8827 - DNA, 20 bp, Homo Sapiens
attgaaaacggtacctgact

SEQ ID NO: 8828 - DNA, 20 bp, Homo Sapiens
ttgaaaacggtacctgacta

SEQ ID NO: 8829 - DNA, 20 bp, Homo Sapiens
tgaaaacggtacctgactac

SEQ ID NO: 8830 - DNA, 20 bp, Homo Sapiens
gaaaacggtacctgactacc

SEQ ID NO: 8831 - DNA, 20 bp, Homo Sapiens
aaaacggtacctgactacca

SEQ ID NO: 8832 - DNA, 20 bp, Homo Sapiens
aaacggtacctgactaccat

SEQ ID NO: 8833 - DNA, 20 bp, Homo Sapiens
aacggtacctgactaccatt

SEQ ID NO: 8834 - DNA, 20 bp, Homo Sapiens
acggtacctgactaccattt

SEQ ID NO: 8835 - DNA, 20 bp, Homo Sapiens
cggtacctgactaccatttg

SEQ ID NO: 8836 - DNA, 20 bp, Homo Sapiens
ggtacctgactaccatttgc

SEQ ID NO: 8837 - DNA, 20 bp, Homo Sapiens
gtacctgactaccatttgct

SEQ ID NO: 8838 - DNA, 20 bp, Homo Sapiens
tacctgactaccatttgctg

SEQ ID NO: 8839 - DNA, 20 bp, Homo Sapiens
acctgactaccatttgctgg

SEQ ID NO: 8840 - DNA, 20 bp, Homo Sapiens
cctgactaccatttgctgga

SEQ ID NO: 8841 - DNA, 20 bp, Homo Sapiens
ctgactaccatttgctggaa

SEQ ID NO: 8842 - DNA, 20 bp, Homo Sapiens
tgactaccatttgctggaaa

SEQ ID NO: 8843 - DNA, 20 bp, Homo Sapiens
gactaccatttgctggaaat

SEQ ID NO: 8844 - DNA, 20 bp, Homo Sapiens
actaccatttgctggaaatt

SEQ ID NO: 8845 - DNA, 20 bp, Homo Sapiens
ctaccatttgctggaaattt

SEQ ID NO: 8846 - DNA, 20 bp, Homo Sapiens
taccatttgctggaaatttg

SEQ ID NO: 8847 - DNA, 20 bp, Homo Sapiens
accatttgctggaaatttga

SEQ ID NO: 8848 - DNA, 20 bp, Homo Sapiens
ccatttgctggaaatttgac

SEQ ID NO: 8849 - DNA, 20 bp, Homo Sapiens
catttgctggaaatttgaca

SEQ ID NO: 8850 - DNA, 20 bp, Homo Sapiens
atttgctggaaatttgacat

SEQ ID NO: 8851 - DNA, 20 bp, Homo Sapiens
tttgctggaaatttgacatg

SEQ ID NO: 8852 - DNA, 20 bp, Homo Sapiens
ttgctggaaatttgacatgt

SEQ ID NO: 8853 - DNA, 20 bp, Homo Sapiens
tgctggaaatttgacatgtg

SEQ ID NO: 8854 - DNA, 20 bp, Homo Sapiens
gctggaaatttgacatgtgt

SEQ ID NO: 8855 - DNA, 20 bp, Homo Sapiens
ctggaaatttgacatgtgtg

SEQ ID NO: 8856 - DNA, 20 bp, Homo Sapiens
tggaaatttgacatgtgtgt

SEQ ID NO: 8857 - DNA, 20 bp, Homo Sapiens
ggaaatttgacatgtgtgtg

SEQ ID NO: 8858 - DNA, 20 bp, Homo Sapiens
gaaatttgacatgtgtgtgg

SEQ ID NO: 8859 - DNA, 20 bp, Homo Sapiens
aaatttgacatgtgtgtggc

SEQ ID NO: 8860 - DNA, 20 bp, Homo Sapiens
aatttgacatgtgtgtggca

SEQ ID NO: 8861 - DNA, 20 bp, Homo Sapiens
atttgacatgtgtgtggcat

SEQ ID NO: 8862 - DNA, 20 bp, Homo Sapiens
tttgacatgtgtgtggcatt

SEQ ID NO: 8863 - DNA, 20 bp, Homo Sapiens
ttgacatgtgtgtggcatta

SEQ ID NO: 8864 - DNA, 20 bp, Homo Sapiens
tgacatgtgtgtggcattat

SEQ ID NO: 8865 - DNA, 20 bp, Homo Sapiens
gacatgtgtgtggcattatc

SEQ ID NO: 8866 - DNA, 20 bp, Homo Sapiens
acatgtgtgtggcattatca

SEQ ID NO: 8867 - DNA, 20 bp, Homo Sapiens
catgtgtgtggcattatcaa

SEQ ID NO: 8868 - DNA, 20 bp, Homo Sapiens
atgtgtgtggcattatcaaa

SEQ ID NO: 8869 - DNA, 20 bp, Homo Sapiens
tgtgtgtggcattatcaaaa

SEQ ID NO: 8870 - DNA, 20 bp, Homo Sapiens
gtgtgtggcattatcaaaat

SEQ ID NO: 8871 - DNA, 20 bp, Homo Sapiens
tgtgtggcattatcaaaatg

SEQ ID NO: 8872 - DNA, 20 bp, Homo Sapiens
gtgtggcattatcaaaatga

SEQ ID NO: 8873 - DNA, 20 bp, Homo Sapiens
tgtggcattatcaaaatgaa

SEQ ID NO: 8874 - DNA, 20 bp, Homo Sapiens
gtggcattatcaaaatgaag

SEQ ID NO: 8875 - DNA, 20 bp, Homo Sapiens
tggcattatcaaaatgaaga

SEQ ID NO: 8876 - DNA, 20 bp, Homo Sapiens
ggcattatcaaaatgaagag

SEQ ID NO: 8877 - DNA, 20 bp, Homo Sapiens
gcattatcaaaatgaagagg

SEQ ID NO: 8878 - DNA, 20 bp, Homo Sapiens
cattatcaaaatgaagagga

SEQ ID NO: 8879 - DNA, 20 bp, Homo Sapiens
attatcaaaatgaagaggag

SEQ ID NO: 8880 - DNA, 20 bp, Homo Sapiens
ttatcaaaatgaagaggagc

SEQ ID NO: 8881 - DNA, 20 bp, Homo Sapiens
tatcaaaatgaagaggagca

SEQ ID NO: 8882 - DNA, 20 bp, Homo Sapiens
atcaaaatgaagaggagcaa

SEQ ID NO: 8883 - DNA, 20 bp, Homo Sapiens
tcaaaatgaagaggagcaag

SEQ ID NO: 8884 - DNA, 20 bp, Homo Sapiens
caaaatgaagaggagcaagg

SEQ ID NO: 8885 - DNA, 20 bp, Homo Sapiens
aaaatgaagaggagcaagga

SEQ ID NO: 8886 - DNA, 20 bp, Homo Sapiens
aaatgaagaggagcaaggag

SEQ ID NO: 8887 - DNA, 20 bp, Homo Sapiens
aatgaagaggagcaaggagt

SEQ ID NO: 8888 - DNA, 20 bp, Homo Sapiens
atgaagaggagcaaggagtg

SEQ ID NO: 8889 - DNA, 20 bp, Homo Sapiens
tgaagaggagcaaggagtga

SEQ ID NO: 8890 - DNA, 20 bp, Homo Sapiens
gaagaggagcaaggagtgaa

SEQ ID NO: 8891 - DNA, 20 bp, Homo Sapiens
aagaggagcaaggagtgaag

SEQ ID NO: 8892 - DNA, 20 bp, Homo Sapiens
agaggagcaaggagtgaagg

SEQ ID NO: 8893 - DNA, 20 bp, Homo Sapiens
gaggagcaaggagtgaagga

SEQ ID NO: 8894 - DNA, 20 bp, Homo Sapiens
aggagcaaggagtgaaggag

SEQ ID NO: 8895 - DNA, 20 bp, Homo Sapiens
ggagcaaggagtgaaggagt

SEQ ID NO: 8896 - DNA, 20 bp, Homo Sapiens
gagcaaggagtgaaggagtg

SEQ ID NO: 8897 - DNA, 20 bp, Homo Sapiens
agcaaggagtgaaggagtgg

SEQ ID NO: 8898 - DNA, 20 bp, Homo Sapiens
gcaaggagtgaaggagtggg

SEQ ID NO: 8899 - DNA, 20 bp, Homo Sapiens
caaggagtgaaggagtgggg

SEQ ID NO: 8900 - DNA, 20 bp, Homo Sapiens
aaggagtgaaggagtggggt

SEQ ID NO: 8901 - DNA, 20 bp, Homo Sapiens
aggagtgaaggagtggggtt

SEQ ID NO: 8902 - DNA, 20 bp, Homo Sapiens
ggagtgaaggagtggggtta

SEQ ID NO: 8903 - DNA, 20 bp, Homo Sapiens
gagtgaaggagtggggttat

SEQ ID NO: 8904 - DNA, 20 bp, Homo Sapiens
agtgaaggagtggggttatg

SEQ ID NO: 8905 - DNA, 20 bp, Homo Sapiens
gtgaaggagtggggttatga

SEQ ID NO: 8906 - DNA, 20 bp, Homo Sapiens
tgaaggagtggggttatgaa

SEQ ID NO: 8907 - DNA, 20 bp, Homo Sapiens
gaaggagtggggttatgaat

SEQ ID NO: 8908 - DNA, 20 bp, Homo Sapiens
aaggagtggggttatgaatc

SEQ ID NO: 8909 - DNA, 20 bp, Homo Sapiens
aggagtggggttatgaatct

SEQ ID NO: 8910 - DNA, 20 bp, Homo Sapiens
ggagtggggttatgaatctg

SEQ ID NO: 8911 - DNA, 20 bp, Homo Sapiens
gagtggggttatgaatctgc

SEQ ID NO: 8912 - DNA, 20 bp, Homo Sapiens
agtggggttatgaatctgcc

SEQ ID NO: 8913 - DNA, 20 bp, Homo Sapiens
gtggggttatgaatctgcca

SEQ ID NO: 8914 - DNA, 20 bp, Homo Sapiens
tggggttatgaatctgccaa

SEQ ID NO: 8915 - DNA, 20 bp, Homo Sapiens
ggggttatgaatctgccaaa

SEQ ID NO: 8916 - DNA, 20 bp, Homo Sapiens
gggttatgaatctgccaaag

SEQ ID NO: 8917 - DNA, 20 bp, Homo Sapiens
ggttatgaatctgccaaagg

SEQ ID NO: 8918 - DNA, 20 bp, Homo Sapiens
gttatgaatctgccaaaggt

SEQ ID NO: 8919 - DNA, 20 bp, Homo Sapiens
ttatgaatctgccaaaggtg

SEQ ID NO: 8920 - DNA, 20 bp, Homo Sapiens
tatgaatctgccaaaggtgg

SEQ ID NO: 8921 - DNA, 20 bp, Homo Sapiens
atgaatctgccaaaggtggt

SEQ ID NO: 8922 - DNA, 20 bp, Homo Sapiens
tgaatctgccaaaggtggta

SEQ ID NO: 8923 - DNA, 20 bp, Homo Sapiens
gaatctgccaaaggtggtat

SEQ ID NO: 8924 - DNA, 20 bp, Homo Sapiens
aatctgccaaaggtggtatg

SEQ ID NO: 8925 - DNA, 20 bp, Homo Sapiens
atctgccaaaggtggtatga

SEQ ID NO: 8926 - DNA, 20 bp, Homo Sapiens
tctgccaaaggtggtatgaa

SEQ ID NO: 8927 - DNA, 20 bp, Homo Sapiens
ctgccaaaggtggtatgaac

SEQ ID NO: 8928 - DNA, 20 bp, Homo Sapiens
tgccaaaggtggtatgaacc

SEQ ID NO: 8929 - DNA, 20 bp, Homo Sapiens
gccaaaggtggtatgaacca

SEQ ID NO: 8930 - DNA, 20 bp, Homo Sapiens
ccaaaggtggtatgaaccaa

SEQ ID NO: 8931 - DNA, 20 bp, Homo Sapiens
caaaggtggtatgaaccaac

SEQ ID NO: 8932 - DNA, 20 bp, Homo Sapiens
aaaggtggtatgaaccaacc

SEQ ID NO: 8933 - DNA, 20 bp, Homo Sapiens
aaggtggtatgaaccaaccc

SEQ ID NO: 8934 - DNA, 20 bp, Homo Sapiens
aggtggtatgaaccaacccc

SEQ ID NO: 8935 - DNA, 20 bp, Homo Sapiens
ggtggtatgaaccaacccct

SEQ ID NO: 8936 - DNA, 20 bp, Homo Sapiens
gtggtatgaaccaacccctg

SEQ ID NO: 8937 - DNA, 20 bp, Homo Sapiens
tggtatgaaccaacccctgg

SEQ ID NO: 8938 - DNA, 20 bp, Homo Sapiens
ggtatgaaccaacccctgga

SEQ ID NO: 8939 - DNA, 20 bp, Homo Sapiens
gtatgaaccaacccctggaa

SEQ ID NO: 8940 - DNA, 20 bp, Homo Sapiens
tatgaaccaacccctggaag

SEQ ID NO: 8941 - DNA, 20 bp, Homo Sapiens
atgaaccaacccctggaagc

SEQ ID NO: 8942 - DNA, 20 bp, Homo Sapiens
tgaaccaacccctggaagcc

SEQ ID NO: 8943 - DNA, 20 bp, Homo Sapiens
gaaccaacccctggaagcca

SEQ ID NO: 8944 - DNA, 20 bp, Homo Sapiens
aaccaacccctggaagccaa

SEQ ID NO: 8945 - DNA, 20 bp, Homo Sapiens
accaacccctggaagccaaa

SEQ ID NO: 8946 - DNA, 20 bp, Homo Sapiens
ccaacccctggaagccaaag

SEQ ID NO: 8947 - DNA, 20 bp, Homo Sapiens
caacccctggaagccaaagc

SEQ ID NO: 8948 - DNA, 20 bp, Homo Sapiens
aacccctggaagccaaagcg

SEQ ID NO: 8949 - DNA, 20 bp, Homo Sapiens
acccctggaagccaaagcgg

SEQ ID NO: 8950 - DNA, 20 bp, Homo Sapiens
cccctggaagccaaagcggc

SEQ ID NO: 8951 - DNA, 20 bp, Homo Sapiens
ccctggaagccaaagcggcc

SEQ ID NO: 8952 - DNA, 20 bp, Homo Sapiens
cctggaagccaaagcggcct

SEQ ID NO: 8953 - DNA, 20 bp, Homo Sapiens
ctggaagccaaagcggcctc

SEQ ID NO: 8954 - DNA, 20 bp, Homo Sapiens
tggaagccaaagcggcctct

SEQ ID NO: 8955 - DNA, 20 bp, Homo Sapiens
ggaagccaaagcggcctctc

SEQ ID NO: 8956 - DNA, 20 bp, Homo Sapiens
gaagccaaagcggcctctcc

SEQ ID NO: 8957 - DNA, 20 bp, Homo Sapiens
aagccaaagcggcctctcca

SEQ ID NO: 8958 - DNA, 20 bp, Homo Sapiens
agccaaagcggcctctccaa

SEQ ID NO: 8959 - DNA, 20 bp, Homo Sapiens
gccaaagcggcctctccaag

SEQ ID NO: 8960 - DNA, 20 bp, Homo Sapiens
ccaaagcggcctctccaagg

SEQ ID NO: 8961 - DNA, 20 bp, Homo Sapiens
caaagcggcctctccaaggt

SEQ ID NO: 8962 - DNA, 20 bp, Homo Sapiens
aaagcggcctctccaaggtt

SEQ ID NO: 8963 - DNA, 20 bp, Homo Sapiens
aagcggcctctccaaggtta

SEQ ID NO: 8964 - DNA, 20 bp, Homo Sapiens
agcggcctctccaaggttaa

SEQ ID NO: 8965 - DNA, 20 bp, Homo Sapiens
gcggcctctccaaggttaaa

SEQ ID NO: 8966 - DNA, 20 bp, Homo Sapiens
cggcctctccaaggttaaat

SEQ ID NO: 8967 - DNA, 20 bp, Homo Sapiens
ggcctctccaaggttaaatt

SEQ ID NO: 8968 - DNA, 20 bp, Homo Sapiens
gcctctccaaggttaaattg

SEQ ID NO: 8969 - DNA, 20 bp, Homo Sapiens
cctctccaaggttaaattga

SEQ ID NO: 8970 - DNA, 20 bp, Homo Sapiens
ctctccaaggttaaattgat

SEQ ID NO: 8971 - DNA, 20 bp, Homo Sapiens
tctccaaggttaaattgatt

SEQ ID NO: 8972 - DNA, 20 bp, Homo Sapiens
ctccaaggttaaattgattg

SEQ ID NO: 8973 - DNA, 20 bp, Homo Sapiens
tccaaggttaaattgattgc

SEQ ID NO: 8974 - DNA, 20 bp, Homo Sapiens
ccaaggttaaattgattgca

SEQ ID NO: 8975 - DNA, 20 bp, Homo Sapiens
caaggttaaattgattgcag

SEQ ID NO: 8976 - DNA, 20 bp, Homo Sapiens
aaggttaaattgattgcagt

SEQ ID NO: 8977 - DNA, 20 bp, Homo Sapiens
aggttaaattgattgcagtt

SEQ ID NO: 8978 - DNA, 20 bp, Homo Sapiens
ggttaaattgattgcagttt

SEQ ID NO: 8979 - DNA, 20 bp, Homo Sapiens
gttaaattgattgcagtttg

SEQ ID NO: 8980 - DNA, 20 bp, Homo Sapiens
ttaaattgattgcagtttgc

SEQ ID NO: 8981 - DNA, 20 bp, Homo Sapiens
taaattgattgcagtttgca

SEQ ID NO: 8982 - DNA, 20 bp, Homo Sapiens
aaattgattgcagtttgcat

SEQ ID NO: 8983 - DNA, 20 bp, Homo Sapiens
aattgattgcagtttgcata

SEQ ID NO: 8984 - DNA, 20 bp, Homo Sapiens
attgattgcagtttgcatat

SEQ ID NO: 8985 - DNA, 20 bp, Homo Sapiens
ttgattgcagtttgcatatt

SEQ ID NO: 8986 - DNA, 20 bp, Homo Sapiens
tgattgcagtttgcatattg

SEQ ID NO: 8987 - DNA, 20 bp, Homo Sapiens
gattgcagtttgcatattgc

SEQ ID NO: 8988 - DNA, 20 bp, Homo Sapiens
attgcagtttgcatattgcc

SEQ ID NO: 8989 - DNA, 20 bp, Homo Sapiens
ttgcagtttgcatattgcct

SEQ ID NO: 8990 - DNA, 20 bp, Homo Sapiens
tgcagtttgcatattgccta

SEQ ID NO: 8991 - DNA, 20 bp, Homo Sapiens
gcagtttgcatattgcctaa

SEQ ID NO: 8992 - DNA, 20 bp, Homo Sapiens
cagtttgcatattgcctaaa

SEQ ID NO: 8993 - DNA, 20 bp, Homo Sapiens
agtttgcatattgcctaaat

SEQ ID NO: 8994 - DNA, 20 bp, Homo Sapiens
gtttgcatattgcctaaatt

SEQ ID NO: 8995 - DNA, 20 bp, Homo Sapiens
tttgcatattgcctaaattt

SEQ ID NO: 8996 - DNA, 20 bp, Homo Sapiens
ttgcatattgcctaaattta

SEQ ID NO: 8997 - DNA, 20 bp, Homo Sapiens
tgcatattgcctaaatttaa

SEQ ID NO: 8998 - DNA, 20 bp, Homo Sapiens
gcatattgcctaaatttaaa

SEQ ID NO: 8999 - DNA, 20 bp, Homo Sapiens
catattgcctaaatttaaac

SEQ ID NO: 9000 - DNA, 20 bp, Homo Sapiens
atattgcctaaatttaaact

SEQ ID NO: 9001 - DNA, 20 bp, Homo Sapiens
tattgcctaaatttaaactt

SEQ ID NO: 9002 - DNA, 20 bp, Homo Sapiens
attgcctaaatttaaacttt

SEQ ID NO: 9003 - DNA, 20 bp, Homo Sapiens
ttgcctaaatttaaactttc

SEQ ID NO: 9004 - DNA, 20 bp, Homo Sapiens
tgcctaaatttaaactttct

SEQ ID NO: 9005 - DNA, 20 bp, Homo Sapiens
gcctaaatttaaactttctc

SEQ ID NO: 9006 - DNA, 20 bp, Homo Sapiens
cctaaatttaaactttctca

SEQ ID NO: 9007 - DNA, 20 bp, Homo Sapiens
ctaaatttaaactttctcat

SEQ ID NO: 9008 - DNA, 20 bp, Homo Sapiens
taaatttaaactttctcatt

SEQ ID NO: 9009 - DNA, 20 bp, Homo Sapiens
aaatttaaactttctcattt

SEQ ID NO: 9010 - DNA, 20 bp, Homo Sapiens
aatttaaactttctcatttg

SEQ ID NO: 9011 - DNA, 20 bp, Homo Sapiens
atttaaactttctcatttgg

SEQ ID NO: 9012 - DNA, 20 bp, Homo Sapiens
tttaaactttctcatttggt

SEQ ID NO: 9013 - DNA, 20 bp, Homo Sapiens
ttaaactttctcatttggtg

SEQ ID NO: 9014 - DNA, 20 bp, Homo Sapiens
taaactttctcatttggtgg

SEQ ID NO: 9015 - DNA, 20 bp, Homo Sapiens
aaactttctcatttggtggg

SEQ ID NO: 9016 - DNA, 20 bp, Homo Sapiens
aactttctcatttggtgggg

SEQ ID NO: 9017 - DNA, 20 bp, Homo Sapiens
actttctcatttggtggggg

SEQ ID NO: 9018 - DNA, 20 bp, Homo Sapiens
ctttctcatttggtgggggt

SEQ ID NO: 9019 - DNA, 20 bp, Homo Sapiens
tttctcatttggtgggggtt

SEQ ID NO: 9020 - DNA, 20 bp, Homo Sapiens
ttctcatttggtgggggttc

SEQ ID NO: 9021 - DNA, 20 bp, Homo Sapiens
tctcatttggtgggggttca

SEQ ID NO: 9022 - DNA, 20 bp, Homo Sapiens
ctcatttggtgggggttcaa

SEQ ID NO: 9023 - DNA, 20 bp, Homo Sapiens
tcatttggtgggggttcaaa

SEQ ID NO: 9024 - DNA, 20 bp, Homo Sapiens
catttggtgggggttcaaaa

SEQ ID NO: 9025 - DNA, 20 bp, Homo Sapiens
atttggtgggggttcaaaag

SEQ ID NO: 9026 - DNA, 20 bp, Homo Sapiens
tttggtgggggttcaaaaga

SEQ ID NO: 9027 - DNA, 20 bp, Homo Sapiens
ttggtgggggttcaaaagaa

SEQ ID NO: 9028 - DNA, 20 bp, Homo Sapiens
tggtgggggttcaaaagaag

SEQ ID NO: 9029 - DNA, 20 bp, Homo Sapiens
ggtgggggttcaaaagaaga

SEQ ID NO: 9030 - DNA, 20 bp, Homo Sapiens
gtgggggttcaaaagaagaa

SEQ ID NO: 9031 - DNA, 20 bp, Homo Sapiens
tgggggttcaaaagaagaat

SEQ ID NO: 9032 - DNA, 20 bp, Homo Sapiens
gggggttcaaaagaagaatc

SEQ ID NO: 9033 - DNA, 20 bp, Homo Sapiens
ggggttcaaaagaagaatca

SEQ ID NO: 9034 - DNA, 20 bp, Homo Sapiens
gggttcaaaagaagaatcag

SEQ ID NO: 9035 - DNA, 20 bp, Homo Sapiens
ggttcaaaagaagaatcagc

SEQ ID NO: 9036 - DNA, 20 bp, Homo Sapiens
gttcaaaagaagaatcagct

SEQ ID NO: 9037 - DNA, 20 bp, Homo Sapiens
ttcaaaagaagaatcagctt

SEQ ID NO: 9038 - DNA, 20 bp, Homo Sapiens
tcaaaagaagaatcagcttg

SEQ ID NO: 9039 - DNA, 20 bp, Homo Sapiens
caaaagaagaatcagcttgt

SEQ ID NO: 9040 - DNA, 20 bp, Homo Sapiens
aaaagaagaatcagcttgtg

SEQ ID NO: 9041 - DNA, 20 bp, Homo Sapiens
aaagaagaatcagcttgtga

SEQ ID NO: 9042 - DNA, 20 bp, Homo Sapiens
aagaagaatcagcttgtgaa

SEQ ID NO: 9043 - DNA, 20 bp, Homo Sapiens
agaagaatcagcttgtgaaa

SEQ ID NO: 9044 - DNA, 20 bp, Homo Sapiens
gaagaatcagcttgtgaaaa

SEQ ID NO: 9045 - DNA, 20 bp, Homo Sapiens
aagaatcagcttgtgaaaaa

SEQ ID NO: 9046 - DNA, 20 bp, Homo Sapiens
agaatcagcttgtgaaaaat

SEQ ID NO: 9047 - DNA, 20 bp, Homo Sapiens
gaatcagcttgtgaaaaatc

SEQ ID NO: 9048 - DNA, 20 bp, Homo Sapiens
aatcagcttgtgaaaaatca

SEQ ID NO: 9049 - DNA, 20 bp, Homo Sapiens
atcagcttgtgaaaaatcag

SEQ ID NO: 9050 - DNA, 20 bp, Homo Sapiens
tcagcttgtgaaaaatcagg

SEQ ID NO: 9051 - DNA, 20 bp, Homo Sapiens
cagcttgtgaaaaatcagga

SEQ ID NO: 9052 - DNA, 20 bp, Homo Sapiens
agcttgtgaaaaatcaggac

SEQ ID NO: 9053 - DNA, 20 bp, Homo Sapiens
gcttgtgaaaaatcaggact

SEQ ID NO: 9054 - DNA, 20 bp, Homo Sapiens
cttgtgaaaaatcaggactt

SEQ ID NO: 9055 - DNA, 20 bp, Homo Sapiens
ttgtgaaaaatcaggacttg

SEQ ID NO: 9056 - DNA, 20 bp, Homo Sapiens
tgtgaaaaatcaggacttga

SEQ ID NO: 9057 - DNA, 20 bp, Homo Sapiens
gtgaaaaatcaggacttgaa

SEQ ID NO: 9058 - DNA, 20 bp, Homo Sapiens
tgaaaaatcaggacttgaag

SEQ ID NO: 9059 - DNA, 20 bp, Homo Sapiens
gaaaaatcaggacttgaaga

SEQ ID NO: 9060 - DNA, 20 bp, Homo Sapiens
aaaaatcaggacttgaagag

SEQ ID NO: 9061 - DNA, 20 bp, Homo Sapiens
aaaatcaggacttgaagaga

SEQ ID NO: 9062 - DNA, 20 bp, Homo Sapiens
aaatcaggacttgaagagag

SEQ ID NO: 9063 - DNA, 20 bp, Homo Sapiens
aatcaggacttgaagagagc

SEQ ID NO: 9064 - DNA, 20 bp, Homo Sapiens
atcaggacttgaagagagcc

SEQ ID NO: 9065 - DNA, 20 bp, Homo Sapiens
tcaggacttgaagagagccg

SEQ ID NO: 9066 - DNA, 20 bp, Homo Sapiens
caggacttgaagagagccgt

SEQ ID NO: 9067 - DNA, 20 bp, Homo Sapiens
aggacttgaagagagccgtc

SEQ ID NO: 9068 - DNA, 20 bp, Homo Sapiens
ggacttgaagagagccgtct

SEQ ID NO: 9069 - DNA, 20 bp, Homo Sapiens
gacttgaagagagccgtcta

SEQ ID NO: 9070 - DNA, 20 bp, Homo Sapiens
acttgaagagagccgtctaa

SEQ ID NO: 9071 - DNA, 20 bp, Homo Sapiens
cttgaagagagccgtctaag

SEQ ID NO: 9072 - DNA, 20 bp, Homo Sapiens
ttgaagagagccgtctaaga

SEQ ID NO: 9073 - DNA, 20 bp, Homo Sapiens
tgaagagagccgtctaagaa

SEQ ID NO: 9074 - DNA, 20 bp, Homo Sapiens
gaagagagccgtctaagaaa

SEQ ID NO: 9075 - DNA, 20 bp, Homo Sapiens
aagagagccgtctaagaaat

SEQ ID NO: 9076 - DNA, 20 bp, Homo Sapiens
agagagccgtctaagaaata

SEQ ID NO: 9077 - DNA, 20 bp, Homo Sapiens
gagagccgtctaagaaatac

SEQ ID NO: 9078 - DNA, 20 bp, Homo Sapiens
agagccgtctaagaaatacc

SEQ ID NO: 9079 - DNA, 20 bp, Homo Sapiens
gagccgtctaagaaatacca

SEQ ID NO: 9080 - DNA, 20 bp, Homo Sapiens
agccgtctaagaaataccac

SEQ ID NO: 9081 - DNA, 20 bp, Homo Sapiens
gccgtctaagaaataccacg

SEQ ID NO: 9082 - DNA, 20 bp, Homo Sapiens
ccgtctaagaaataccacgt

SEQ ID NO: 9083 - DNA, 20 bp, Homo Sapiens
cgtctaagaaataccacgtg

SEQ ID NO: 9084 - DNA, 20 bp, Homo Sapiens
gtctaagaaataccacgtgc

SEQ ID NO: 9085 - DNA, 20 bp, Homo Sapiens
tctaagaaataccacgtgct

SEQ ID NO: 9086 - DNA, 20 bp, Homo Sapiens
ctaagaaataccacgtgctt

SEQ ID NO: 9087 - DNA, 20 bp, Homo Sapiens
taagaaataccacgtgcttt

SEQ ID NO: 9088 - DNA, 20 bp, Homo Sapiens
aagaaataccacgtgctttt

SEQ ID NO: 9089 - DNA, 20 bp, Homo Sapiens
agaaataccacgtgcttttt

SEQ ID NO: 9090 - DNA, 20 bp, Homo Sapiens
gaaataccacgtgctttttt

SEQ ID NO: 9091 - DNA, 20 bp, Homo Sapiens
aaataccacgtgcttttttt

SEQ ID NO: 9092 - DNA, 20 bp, Homo Sapiens
aataccacgtgctttttttc

SEQ ID NO: 9093 - DNA, 20 bp, Homo Sapiens
ataccacgtgctttttttct

SEQ ID NO: 9094 - DNA, 20 bp, Homo Sapiens
taccacgtgctttttttctt

SEQ ID NO: 9095 - DNA, 20 bp, Homo Sapiens
accacgtgctttttttcttt

SEQ ID NO: 9096 - DNA, 20 bp, Homo Sapiens
ccacgtgctttttttcttta

SEQ ID NO: 9097 - DNA, 20 bp, Homo Sapiens
cacgtgctttttttctttac

SEQ ID NO: 9098 - DNA, 20 bp, Homo Sapiens
acgtgctttttttctttacc

SEQ ID NO: 9099 - DNA, 20 bp, Homo Sapiens
cgtgctttttttctttacca

SEQ ID NO: 9100 - DNA, 20 bp, Homo Sapiens
gtgctttttttctttaccat

SEQ ID NO: 9101 - DNA, 20 bp, Homo Sapiens
tgctttttttctttaccatt

SEQ ID NO: 9102 - DNA, 20 bp, Homo Sapiens
gctttttttctttaccattt

SEQ ID NO: 9103 - DNA, 20 bp, Homo Sapiens
ctttttttctttaccatttt

SEQ ID NO: 9104 - DNA, 20 bp, Homo Sapiens
tttttttctttaccattttg

SEQ ID NO: 9105 - DNA, 20 bp, Homo Sapiens
ttttttctttaccattttgc

SEQ ID NO: 9106 - DNA, 20 bp, Homo Sapiens
tttttctttaccattttgct

SEQ ID NO: 9107 - DNA, 20 bp, Homo Sapiens
ttttctttaccattttgctt

SEQ ID NO: 9108 - DNA, 20 bp, Homo Sapiens
tttctttaccattttgcttt

SEQ ID NO: 9109 - DNA, 20 bp, Homo Sapiens
ttctttaccattttgctttc

SEQ ID NO: 9110 - DNA, 20 bp, Homo Sapiens
tctttaccattttgctttcc

SEQ ID NO: 9111 - DNA, 20 bp, Homo Sapiens
ctttaccattttgctttccc

SEQ ID NO: 9112 - DNA, 20 bp, Homo Sapiens
tttaccattttgctttccca

SEQ ID NO: 9113 - DNA, 20 bp, Homo Sapiens
ttaccattttgctttcccag

SEQ ID NO: 9114 - DNA, 20 bp, Homo Sapiens
taccattttgctttcccagc

SEQ ID NO: 9115 - DNA, 20 bp, Homo Sapiens
accattttgctttcccagcc

SEQ ID NO: 9116 - DNA, 20 bp, Homo Sapiens
ccattttgctttcccagcct

SEQ ID NO: 9117 - DNA, 20 bp, Homo Sapiens
cattttgctttcccagcctc

SEQ ID NO: 9118 - DNA, 20 bp, Homo Sapiens
attttgctttcccagcctcc

SEQ ID NO: 9119 - DNA, 20 bp, Homo Sapiens
ttttgctttcccagcctcca

SEQ ID NO: 9120 - DNA, 20 bp, Homo Sapiens
tttgctttcccagcctccaa

SEQ ID NO: 9121 - DNA, 20 bp, Homo Sapiens
ttgctttcccagcctccaaa

SEQ ID NO: 9122 - DNA, 20 bp, Homo Sapiens
tgctttcccagcctccaaac

SEQ ID NO: 9123 - DNA, 20 bp, Homo Sapiens
gctttcccagcctccaaaca

SEQ ID NO: 9124 - DNA, 20 bp, Homo Sapiens
ctttcccagcctccaaacat

SEQ ID NO: 9125 - DNA, 20 bp, Homo Sapiens
tttcccagcctccaaacata

SEQ ID NO: 9126 - DNA, 20 bp, Homo Sapiens
ttcccagcctccaaacatag

SEQ ID NO: 9127 - DNA, 20 bp, Homo Sapiens
tcccagcctccaaacatagt

SEQ ID NO: 9128 - DNA, 20 bp, Homo Sapiens
cccagcctccaaacatagtt

SEQ ID NO: 9129 - DNA, 20 bp, Homo Sapiens
ccagcctccaaacatagtta

SEQ ID NO: 9130 - DNA, 20 bp, Homo Sapiens
cagcctccaaacatagttaa

SEQ ID NO: 9131 - DNA, 20 bp, Homo Sapiens
agcctccaaacatagttaat

SEQ ID NO: 9132 - DNA, 20 bp, Homo Sapiens
gcctccaaacatagttaata

SEQ ID NO: 9133 - DNA, 20 bp, Homo Sapiens
cctccaaacatagttaatag

SEQ ID NO: 9134 - DNA, 20 bp, Homo Sapiens
ctccaaacatagttaataga

SEQ ID NO: 9135 - DNA, 20 bp, Homo Sapiens
tccaaacatagttaatagaa

SEQ ID NO: 9136 - DNA, 20 bp, Homo Sapiens
ccaaacatagttaatagaaa

SEQ ID NO: 9137 - DNA, 20 bp, Homo Sapiens
caaacatagttaatagaaat

SEQ ID NO: 9138 - DNA, 20 bp, Homo Sapiens
aaacatagttaatagaaatt

SEQ ID NO: 9139 - DNA, 20 bp, Homo Sapiens
aacatagttaatagaaattt

SEQ ID NO: 9140 - DNA, 20 bp, Homo Sapiens
acatagttaatagaaatttc

SEQ ID NO: 9141 - DNA, 20 bp, Homo Sapiens
catagttaatagaaatttcc

SEQ ID NO: 9142 - DNA, 20 bp, Homo Sapiens
atagttaatagaaatttccc

SEQ ID NO: 9143 - DNA, 20 bp, Homo Sapiens
tagttaatagaaatttccct

SEQ ID NO: 9144 - DNA, 20 bp, Homo Sapiens
agttaatagaaatttccctt

SEQ ID NO: 9145 - DNA, 20 bp, Homo Sapiens
gttaatagaaatttcccttc

SEQ ID NO: 9146 - DNA, 20 bp, Homo Sapiens
ttaatagaaatttcccttca

SEQ ID NO: 9147 - DNA, 20 bp, Homo Sapiens
taatagaaatttcccttcaa

SEQ ID NO: 9148 - DNA, 20 bp, Homo Sapiens
aatagaaatttcccttcaaa

SEQ ID NO: 9149 - DNA, 20 bp, Homo Sapiens
atagaaatttcccttcaaag

SEQ ID NO: 9150 - DNA, 20 bp, Homo Sapiens
tagaaatttcccttcaaaga

SEQ ID NO: 9151 - DNA, 20 bp, Homo Sapiens
agaaatttcccttcaaagaa

SEQ ID NO: 9152 - DNA, 20 bp, Homo Sapiens
gaaatttcccttcaaagaac

SEQ ID NO: 9153 - DNA, 20 bp, Homo Sapiens
aaatttcccttcaaagaact

SEQ ID NO: 9154 - DNA, 20 bp, Homo Sapiens
aatttcccttcaaagaactg

SEQ ID NO: 9155 - DNA, 20 bp, Homo Sapiens
atttcccttcaaagaactgt

SEQ ID NO: 9156 - DNA, 20 bp, Homo Sapiens
tttcccttcaaagaactgtc

SEQ ID NO: 9157 - DNA, 20 bp, Homo Sapiens
ttcccttcaaagaactgtct

SEQ ID NO: 9158 - DNA, 20 bp, Homo Sapiens
tcccttcaaagaactgtctg

SEQ ID NO: 9159 - DNA, 20 bp, Homo Sapiens
cccttcaaagaactgtctgg

SEQ ID NO: 9160 - DNA, 20 bp, Homo Sapiens
ccttcaaagaactgtctggg

SEQ ID NO: 9161 - DNA, 20 bp, Homo Sapiens
cttcaaagaactgtctgggg

SEQ ID NO: 9162 - DNA, 20 bp, Homo Sapiens
ttcaaagaactgtctgggga

SEQ ID NO: 9163 - DNA, 20 bp, Homo Sapiens
tcaaagaactgtctggggat

SEQ ID NO: 9164 - DNA, 20 bp, Homo Sapiens
caaagaactgtctggggatg

SEQ ID NO: 9165 - DNA, 20 bp, Homo Sapiens
aaagaactgtctggggatgt

SEQ ID NO: 9166 - DNA, 20 bp, Homo Sapiens
aagaactgtctggggatgtg

SEQ ID NO: 9167 - DNA, 20 bp, Homo Sapiens
agaactgtctggggatgtga

SEQ ID NO: 9168 - DNA, 20 bp, Homo Sapiens
gaactgtctggggatgtgat

SEQ ID NO: 9169 - DNA, 20 bp, Homo Sapiens
aactgtctggggatgtgatg

SEQ ID NO: 9170 - DNA, 20 bp, Homo Sapiens
actgtctggggatgtgatgc

SEQ ID NO: 9171 - DNA, 20 bp, Homo Sapiens
ctgtctggggatgtgatgct

SEQ ID NO: 9172 - DNA, 20 bp, Homo Sapiens
tgtctggggatgtgatgctt

SEQ ID NO: 9173 - DNA, 20 bp, Homo Sapiens
gtctggggatgtgatgcttt

SEQ ID NO: 9174 - DNA, 20 bp, Homo Sapiens
tctggggatgtgatgctttg

SEQ ID NO: 9175 - DNA, 20 bp, Homo Sapiens
ctggggatgtgatgctttga

SEQ ID NO: 9176 - DNA, 20 bp, Homo Sapiens
tggggatgtgatgctttgaa

SEQ ID NO: 9177 - DNA, 20 bp, Homo Sapiens
ggggatgtgatgctttgaaa

SEQ ID NO: 9178 - DNA, 20 bp, Homo Sapiens
gggatgtgatgctttgaaaa

SEQ ID NO: 9179 - DNA, 20 bp, Homo Sapiens
ggatgtgatgctttgaaaaa

SEQ ID NO: 9180 - DNA, 20 bp, Homo Sapiens
gatgtgatgctttgaaaaat

SEQ ID NO: 9181 - DNA, 20 bp, Homo Sapiens
atgtgatgctttgaaaaatc

SEQ ID NO: 9182 - DNA, 20 bp, Homo Sapiens
tgtgatgctttgaaaaatct

SEQ ID NO: 9183 - DNA, 20 bp, Homo Sapiens
gtgatgctttgaaaaatcta

SEQ ID NO: 9184 - DNA, 20 bp, Homo Sapiens
tgatgctttgaaaaatctaa

SEQ ID NO: 9185 - DNA, 20 bp, Homo Sapiens
gatgctttgaaaaatctaat

SEQ ID NO: 9186 - DNA, 20 bp, Homo Sapiens
atgctttgaaaaatctaatc

SEQ ID NO: 9187 - DNA, 20 bp, Homo Sapiens
tgctttgaaaaatctaatca

SEQ ID NO: 9188 - DNA, 20 bp, Homo Sapiens
gctttgaaaaatctaatcag

SEQ ID NO: 9189 - DNA, 20 bp, Homo Sapiens
ctttgaaaaatctaatcagt

SEQ ID NO: 9190 - DNA, 20 bp, Homo Sapiens
tttgaaaaatctaatcagtg

SEQ ID NO: 9191 - DNA, 20 bp, Homo Sapiens
ttgaaaaatctaatcagtga

SEQ ID NO: 9192 - DNA, 20 bp, Homo Sapiens
tgaaaaatctaatcagtgac

SEQ ID NO: 9193 - DNA, 20 bp, Homo Sapiens
gaaaaatctaatcagtgact

SEQ ID NO: 9194 - DNA, 20 bp, Homo Sapiens
aaaaatctaatcagtgactt

SEQ ID NO: 9195 - DNA, 20 bp, Homo Sapiens
aaaatctaatcagtgactta

SEQ ID NO: 9196 - DNA, 20 bp, Homo Sapiens
aaatctaatcagtgacttaa

SEQ ID NO: 9197 - DNA, 20 bp, Homo Sapiens
aatctaatcagtgacttaag

SEQ ID NO: 9198 - DNA, 20 bp, Homo Sapiens
atctaatcagtgacttaaga

SEQ ID NO: 9199 - DNA, 20 bp, Homo Sapiens
tctaatcagtgacttaagag

SEQ ID NO: 9200 - DNA, 20 bp, Homo Sapiens
ctaatcagtgacttaagaga

SEQ ID NO: 9201 - DNA, 20 bp, Homo Sapiens
taatcagtgacttaagagag

SEQ ID NO: 9202 - DNA, 20 bp, Homo Sapiens
aatcagtgacttaagagaga

SEQ ID NO: 9203 - DNA, 20 bp, Homo Sapiens
atcagtgacttaagagagat

SEQ ID NO: 9204 - DNA, 20 bp, Homo Sapiens
tcagtgacttaagagagatt

SEQ ID NO: 9205 - DNA, 20 bp, Homo Sapiens
cagtgacttaagagagattt

SEQ ID NO: 9206 - DNA, 20 bp, Homo Sapiens
agtgacttaagagagatttt

SEQ ID NO: 9207 - DNA, 20 bp, Homo Sapiens
gtgacttaagagagattttc

SEQ ID NO: 9208 - DNA, 20 bp, Homo Sapiens
tgacttaagagagattttct

SEQ ID NO: 9209 - DNA, 20 bp, Homo Sapiens
gacttaagagagattttctt

SEQ ID NO: 9210 - DNA, 20 bp, Homo Sapiens
acttaagagagattttcttg

SEQ ID NO: 9211 - DNA, 20 bp, Homo Sapiens
cttaagagagattttcttgt

SEQ ID NO: 9212 - DNA, 20 bp, Homo Sapiens
ttaagagagattttcttgta

SEQ ID NO: 9213 - DNA, 20 bp, Homo Sapiens
taagagagattttcttgtat

SEQ ID NO: 9214 - DNA, 20 bp, Homo Sapiens
aagagagattttcttgtata

SEQ ID NO: 9215 - DNA, 20 bp, Homo Sapiens
agagagattttcttgtatac

SEQ ID NO: 9216 - DNA, 20 bp, Homo Sapiens
gagagattttcttgtataca

SEQ ID NO: 9217 - DNA, 20 bp, Homo Sapiens
agagattttcttgtatacag

SEQ ID NO: 9218 - DNA, 20 bp, Homo Sapiens
gagattttcttgtatacagg

SEQ ID NO: 9219 - DNA, 20 bp, Homo Sapiens
agattttcttgtatacaggg

SEQ ID NO: 9220 - DNA, 20 bp, Homo Sapiens
gattttcttgtatacaggga

SEQ ID NO: 9221 - DNA, 20 bp, Homo Sapiens
attttcttgtatacagggag

SEQ ID NO: 9222 - DNA, 20 bp, Homo Sapiens
ttttcttgtatacagggaga

SEQ ID NO: 9223 - DNA, 20 bp, Homo Sapiens
tttcttgtatacagggagag

SEQ ID NO: 9224 - DNA, 20 bp, Homo Sapiens
ttcttgtatacagggagagt

SEQ ID NO: 9225 - DNA, 20 bp, Homo Sapiens
tcttgtatacagggagagtg

SEQ ID NO: 9226 - DNA, 20 bp, Homo Sapiens
cttgtatacagggagagtga

SEQ ID NO: 9227 - DNA, 20 bp, Homo Sapiens
ttgtatacagggagagtgag

SEQ ID NO: 9228 - DNA, 20 bp, Homo Sapiens
tgtatacagggagagtgaga

SEQ ID NO: 9229 - DNA, 20 bp, Homo Sapiens
gtatacagggagagtgagat

SEQ ID NO: 9230 - DNA, 20 bp, Homo Sapiens
tatacagggagagtgagata

SEQ ID NO: 9231 - DNA, 20 bp, Homo Sapiens
atacagggagagtgagataa

SEQ ID NO: 9232 - DNA, 20 bp, Homo Sapiens
tacagggagagtgagataac

SEQ ID NO: 9233 - DNA, 20 bp, Homo Sapiens
acagggagagtgagataact

SEQ ID NO: 9234 - DNA, 20 bp, Homo Sapiens
cagggagagtgagataactt

SEQ ID NO: 9235 - DNA, 20 bp, Homo Sapiens
agggagagtgagataactta

SEQ ID NO: 9236 - DNA, 20 bp, Homo Sapiens
gggagagtgagataacttat

SEQ ID NO: 9237 - DNA, 20 bp, Homo Sapiens
ggagagtgagataacttatt

SEQ ID NO: 9238 - DNA, 20 bp, Homo Sapiens
gagagtgagataacttattg

SEQ ID NO: 9239 - DNA, 20 bp, Homo Sapiens
agagtgagataacttattgt

SEQ ID NO: 9240 - DNA, 20 bp, Homo Sapiens
gagtgagataacttattgtg

SEQ ID NO: 9241 - DNA, 20 bp, Homo Sapiens
agtgagataacttattgtga

SEQ ID NO: 9242 - DNA, 20 bp, Homo Sapiens
gtgagataacttattgtgaa

SEQ ID NO: 9243 - DNA, 20 bp, Homo Sapiens
tgagataacttattgtgaag

SEQ ID NO: 9244 - DNA, 20 bp, Homo Sapiens
gagataacttattgtgaagg

SEQ ID NO: 9245 - DNA, 20 bp, Homo Sapiens
agataacttattgtgaaggg

SEQ ID NO: 9246 - DNA, 20 bp, Homo Sapiens
gataacttattgtgaagggt

SEQ ID NO: 9247 - DNA, 20 bp, Homo Sapiens
ataacttattgtgaagggtt

SEQ ID NO: 9248 - DNA, 20 bp, Homo Sapiens
taacttattgtgaagggtta

SEQ ID NO: 9249 - DNA, 20 bp, Homo Sapiens
aacttattgtgaagggttag

SEQ ID NO: 9250 - DNA, 20 bp, Homo Sapiens
acttattgtgaagggttagc

SEQ ID NO: 9251 - DNA, 20 bp, Homo Sapiens
cttattgtgaagggttagct

SEQ ID NO: 9252 - DNA, 20 bp, Homo Sapiens
ttattgtgaagggttagctt

SEQ ID NO: 9253 - DNA, 20 bp, Homo Sapiens
tattgtgaagggttagcttt

SEQ ID NO: 9254 - DNA, 20 bp, Homo Sapiens
attgtgaagggttagcttta

SEQ ID NO: 9255 - DNA, 20 bp, Homo Sapiens
ttgtgaagggttagctttac

SEQ ID NO: 9256 - DNA, 20 bp, Homo Sapiens
tgtgaagggttagctttact

SEQ ID NO: 9257 - DNA, 20 bp, Homo Sapiens
gtgaagggttagctttactg

SEQ ID NO: 9258 - DNA, 20 bp, Homo Sapiens
tgaagggttagctttactgt

SEQ ID NO: 9259 - DNA, 20 bp, Homo Sapiens
gaagggttagctttactgta

SEQ ID NO: 9260 - DNA, 20 bp, Homo Sapiens
aagggttagctttactgtac

SEQ ID NO: 9261 - DNA, 20 bp, Homo Sapiens
agggttagctttactgtaca

SEQ ID NO: 9262 - DNA, 20 bp, Homo Sapiens
gggttagctttactgtacag

SEQ ID NO: 9263 - DNA, 20 bp, Homo Sapiens
ggttagctttactgtacagg

SEQ ID NO: 9264 - DNA, 20 bp, Homo Sapiens
gttagctttactgtacagga

SEQ ID NO: 9265 - DNA, 20 bp, Homo Sapiens
ttagctttactgtacaggat

SEQ ID NO: 9266 - DNA, 20 bp, Homo Sapiens
tagctttactgtacaggata

SEQ ID NO: 9267 - DNA, 20 bp, Homo Sapiens
agctttactgtacaggatag

SEQ ID NO: 9268 - DNA, 20 bp, Homo Sapiens
gctttactgtacaggatagc

SEQ ID NO: 9269 - DNA, 20 bp, Homo Sapiens
ctttactgtacaggatagca

SEQ ID NO: 9270 - DNA, 20 bp, Homo Sapiens
tttactgtacaggatagcag

SEQ ID NO: 9271 - DNA, 20 bp, Homo Sapiens
ttactgtacaggatagcagg

SEQ ID NO: 9272 - DNA, 20 bp, Homo Sapiens
tactgtacaggatagcaggg

SEQ ID NO: 9273 - DNA, 20 bp, Homo Sapiens
actgtacaggatagcaggga

SEQ ID NO: 9274 - DNA, 20 bp, Homo Sapiens
ctgtacaggatagcagggaa

SEQ ID NO: 9275 - DNA, 20 bp, Homo Sapiens
tgtacaggatagcagggaac

SEQ ID NO: 9276 - DNA, 20 bp, Homo Sapiens
gtacaggatagcagggaact

SEQ ID NO: 9277 - DNA, 20 bp, Homo Sapiens
tacaggatagcagggaactg

SEQ ID NO: 9278 - DNA, 20 bp, Homo Sapiens
acaggatagcagggaactgg

SEQ ID NO: 9279 - DNA, 20 bp, Homo Sapiens
caggatagcagggaactgga

SEQ ID NO: 9280 - DNA, 20 bp, Homo Sapiens
aggatagcagggaactggac

SEQ ID NO: 9281 - DNA, 20 bp, Homo Sapiens
ggatagcagggaactggaca

SEQ ID NO: 9282 - DNA, 20 bp, Homo Sapiens
gatagcagggaactggacat

SEQ ID NO: 9283 - DNA, 20 bp, Homo Sapiens
atagcagggaactggacatc

SEQ ID NO: 9284 - DNA, 20 bp, Homo Sapiens
tagcagggaactggacatct

SEQ ID NO: 9285 - DNA, 20 bp, Homo Sapiens
agcagggaactggacatctc

SEQ ID NO: 9286 - DNA, 20 bp, Homo Sapiens
gcagggaactggacatctca

SEQ ID NO: 9287 - DNA, 20 bp, Homo Sapiens
cagggaactggacatctcag

SEQ ID NO: 9288 - DNA, 20 bp, Homo Sapiens
agggaactggacatctcagg

SEQ ID NO: 9289 - DNA, 20 bp, Homo Sapiens
gggaactggacatctcaggg

SEQ ID NO: 9290 - DNA, 20 bp, Homo Sapiens
ggaactggacatctcagggt

SEQ ID NO: 9291 - DNA, 20 bp, Homo Sapiens
gaactggacatctcagggta

SEQ ID NO: 9292 - DNA, 20 bp, Homo Sapiens
aactggacatctcagggtaa

SEQ ID NO: 9293 - DNA, 20 bp, Homo Sapiens
actggacatctcagggtaaa

SEQ ID NO: 9294 - DNA, 20 bp, Homo Sapiens
ctggacatctcagggtaaaa

SEQ ID NO: 9295 - DNA, 20 bp, Homo Sapiens
tggacatctcagggtaaaag

SEQ ID NO: 9296 - DNA, 20 bp, Homo Sapiens
ggacatctcagggtaaaagt

SEQ ID NO: 9297 - DNA, 20 bp, Homo Sapiens
gacatctcagggtaaaagtc

SEQ ID NO: 9298 - DNA, 20 bp, Homo Sapiens
acatctcagggtaaaagtca

SEQ ID NO: 9299 - DNA, 20 bp, Homo Sapiens
catctcagggtaaaagtcag

SEQ ID NO: 9300 - DNA, 20 bp, Homo Sapiens
atctcagggtaaaagtcagt

SEQ ID NO: 9301 - DNA, 20 bp, Homo Sapiens
tctcagggtaaaagtcagta

SEQ ID NO: 9302 - DNA, 20 bp, Homo Sapiens
ctcagggtaaaagtcagtac

SEQ ID NO: 9303 - DNA, 20 bp, Homo Sapiens
tcagggtaaaagtcagtacg

SEQ ID NO: 9304 - DNA, 20 bp, Homo Sapiens
cagggtaaaagtcagtacgg

SEQ ID NO: 9305 - DNA, 20 bp, Homo Sapiens
agggtaaaagtcagtacgga

SEQ ID NO: 9306 - DNA, 20 bp, Homo Sapiens
gggtaaaagtcagtacggat

SEQ ID NO: 9307 - DNA, 20 bp, Homo Sapiens
ggtaaaagtcagtacggatt

SEQ ID NO: 9308 - DNA, 20 bp, Homo Sapiens
gtaaaagtcagtacggattt

SEQ ID NO: 9309 - DNA, 20 bp, Homo Sapiens
taaaagtcagtacggatttt

SEQ ID NO: 9310 - DNA, 20 bp, Homo Sapiens
aaaagtcagtacggatttta

SEQ ID NO: 9311 - DNA, 20 bp, Homo Sapiens
aaagtcagtacggattttaa

SEQ ID NO: 9312 - DNA, 20 bp, Homo Sapiens
aagtcagtacggattttaat

SEQ ID NO: 9313 - DNA, 20 bp, Homo Sapiens
agtcagtacggattttaata

SEQ ID NO: 9314 - DNA, 20 bp, Homo Sapiens
gtcagtacggattttaatag

SEQ ID NO: 9315 - DNA, 20 bp, Homo Sapiens
tcagtacggattttaatagc

SEQ ID NO: 9316 - DNA, 20 bp, Homo Sapiens
cagtacggattttaatagcc

SEQ ID NO: 9317 - DNA, 20 bp, Homo Sapiens
agtacggattttaatagcct

SEQ ID NO: 9318 - DNA, 20 bp, Homo Sapiens
gtacggattttaatagcctg

SEQ ID NO: 9319 - DNA, 20 bp, Homo Sapiens
tacggattttaatagcctgg

SEQ ID NO: 9320 - DNA, 20 bp, Homo Sapiens
acggattttaatagcctggg

SEQ ID NO: 9321 - DNA, 20 bp, Homo Sapiens
cggattttaatagcctgggg

SEQ ID NO: 9322 - DNA, 20 bp, Homo Sapiens
ggattttaatagcctgggga

SEQ ID NO: 9323 - DNA, 20 bp, Homo Sapiens
gattttaatagcctggggag

SEQ ID NO: 9324 - DNA, 20 bp, Homo Sapiens
attttaatagcctggggagg

SEQ ID NO: 9325 - DNA, 20 bp, Homo Sapiens
ttttaatagcctggggagga

SEQ ID NO: 9326 - DNA, 20 bp, Homo Sapiens
tttaatagcctggggaggaa

SEQ ID NO: 9327 - DNA, 20 bp, Homo Sapiens
ttaatagcctggggaggaaa

SEQ ID NO: 9328 - DNA, 20 bp, Homo Sapiens
taatagcctggggaggaaaa

SEQ ID NO: 9329 - DNA, 20 bp, Homo Sapiens
aatagcctggggaggaaaac

SEQ ID NO: 9330 - DNA, 20 bp, Homo Sapiens
atagcctggggaggaaaaca

SEQ ID NO: 9331 - DNA, 20 bp, Homo Sapiens
tagcctggggaggaaaacac

SEQ ID NO: 9332 - DNA, 20 bp, Homo Sapiens
agcctggggaggaaaacaca

SEQ ID NO: 9333 - DNA, 20 bp, Homo Sapiens
gcctggggaggaaaacacat

SEQ ID NO: 9334 - DNA, 20 bp, Homo Sapiens
cctggggaggaaaacacatt

SEQ ID NO: 9335 - DNA, 20 bp, Homo Sapiens
ctggggaggaaaacacattc

SEQ ID NO: 9336 - DNA, 20 bp, Homo Sapiens
tggggaggaaaacacattct

SEQ ID NO: 9337 - DNA, 20 bp, Homo Sapiens
ggggaggaaaacacattctt

SEQ ID NO: 9338 - DNA, 20 bp, Homo Sapiens
gggaggaaaacacattcttt

SEQ ID NO: 9339 - DNA, 20 bp, Homo Sapiens
ggaggaaaacacattctttg

SEQ ID NO: 9340 - DNA, 20 bp, Homo Sapiens
gaggaaaacacattctttgc

SEQ ID NO: 9341 - DNA, 20 bp, Homo Sapiens
aggaaaacacattctttgcc

SEQ ID NO: 9342 - DNA, 20 bp, Homo Sapiens
ggaaaacacattctttgcca

SEQ ID NO: 9343 - DNA, 20 bp, Homo Sapiens
gaaaacacattctttgccac

SEQ ID NO: 9344 - DNA, 20 bp, Homo Sapiens
aaaacacattctttgccaca

SEQ ID NO: 9345 - DNA, 20 bp, Homo Sapiens
aaacacattctttgccacag

SEQ ID NO: 9346 - DNA, 20 bp, Homo Sapiens
aacacattctttgccacaga

SEQ ID NO: 9347 - DNA, 20 bp, Homo Sapiens
acacattctttgccacagac

SEQ ID NO: 9348 - DNA, 20 bp, Homo Sapiens
cacattctttgccacagaca

SEQ ID NO: 9349 - DNA, 20 bp, Homo Sapiens
acattctttgccacagacag

SEQ ID NO: 9350 - DNA, 20 bp, Homo Sapiens
cattctttgccacagacagg

SEQ ID NO: 9351 - DNA, 20 bp, Homo Sapiens
attctttgccacagacaggc

SEQ ID NO: 9352 - DNA, 20 bp, Homo Sapiens
ttctttgccacagacaggca

SEQ ID NO: 9353 - DNA, 20 bp, Homo Sapiens
tctttgccacagacaggcaa

SEQ ID NO: 9354 - DNA, 20 bp, Homo Sapiens
ctttgccacagacaggcaaa

SEQ ID NO: 9355 - DNA, 20 bp, Homo Sapiens
tttgccacagacaggcaaag

SEQ ID NO: 9356 - DNA, 20 bp, Homo Sapiens
ttgccacagacaggcaaagc

SEQ ID NO: 9357 - DNA, 20 bp, Homo Sapiens
tgccacagacaggcaaagca

SEQ ID NO: 9358 - DNA, 20 bp, Homo Sapiens
gccacagacaggcaaagcaa

SEQ ID NO: 9359 - DNA, 20 bp, Homo Sapiens
ccacagacaggcaaagcaac

SEQ ID NO: 9360 - DNA, 20 bp, Homo Sapiens
cacagacaggcaaagcaaca

SEQ ID NO: 9361 - DNA, 20 bp, Homo Sapiens
acagacaggcaaagcaacac

SEQ ID NO: 9362 - DNA, 20 bp, Homo Sapiens
cagacaggcaaagcaacaca

SEQ ID NO: 9363 - DNA, 20 bp, Homo Sapiens
agacaggcaaagcaacacat

SEQ ID NO: 9364 - DNA, 20 bp, Homo Sapiens
gacaggcaaagcaacacatg

SEQ ID NO: 9365 - DNA, 20 bp, Homo Sapiens
acaggcaaagcaacacatgc

SEQ ID NO: 9366 - DNA, 20 bp, Homo Sapiens
caggcaaagcaacacatgct

SEQ ID NO: 9367 - DNA, 20 bp, Homo Sapiens
aggcaaagcaacacatgctc

SEQ ID NO: 9368 - DNA, 20 bp, Homo Sapiens
ggcaaagcaacacatgctca

SEQ ID NO: 9369 - DNA, 20 bp, Homo Sapiens
gcaaagcaacacatgctcat

SEQ ID NO: 9370 - DNA, 20 bp, Homo Sapiens
caaagcaacacatgctcatc

SEQ ID NO: 9371 - DNA, 20 bp, Homo Sapiens
aaagcaacacatgctcatcc

SEQ ID NO: 9372 - DNA, 20 bp, Homo Sapiens
aagcaacacatgctcatcct

SEQ ID NO: 9373 - DNA, 20 bp, Homo Sapiens
agcaacacatgctcatcctc

SEQ ID NO: 9374 - DNA, 20 bp, Homo Sapiens
gcaacacatgctcatcctcc

SEQ ID NO: 9375 - DNA, 20 bp, Homo Sapiens
caacacatgctcatcctcct

SEQ ID NO: 9376 - DNA, 20 bp, Homo Sapiens
aacacatgctcatcctcctg

SEQ ID NO: 9377 - DNA, 20 bp, Homo Sapiens
acacatgctcatcctcctgc

SEQ ID NO: 9378 - DNA, 20 bp, Homo Sapiens
cacatgctcatcctcctgcc

SEQ ID NO: 9379 - DNA, 20 bp, Homo Sapiens
acatgctcatcctcctgcct

SEQ ID NO: 9380 - DNA, 20 bp, Homo Sapiens
catgctcatcctcctgccta

SEQ ID NO: 9381 - DNA, 20 bp, Homo Sapiens
atgctcatcctcctgcctat

SEQ ID NO: 9382 - DNA, 20 bp, Homo Sapiens
tgctcatcctcctgcctatg

SEQ ID NO: 9383 - DNA, 20 bp, Homo Sapiens
gctcatcctcctgcctatgc

SEQ ID NO: 9384 - DNA, 20 bp, Homo Sapiens
ctcatcctcctgcctatgct

SEQ ID NO: 9385 - DNA, 20 bp, Homo Sapiens
tcatcctcctgcctatgctg

SEQ ID NO: 9386 - DNA, 20 bp, Homo Sapiens
catcctcctgcctatgctga

SEQ ID NO: 9387 - DNA, 20 bp, Homo Sapiens
atcctcctgcctatgctgag

SEQ ID NO: 9388 - DNA, 20 bp, Homo Sapiens
tcctcctgcctatgctgaga

SEQ ID NO: 9389 - DNA, 20 bp, Homo Sapiens
cctcctgcctatgctgagat

SEQ ID NO: 9390 - DNA, 20 bp, Homo Sapiens
ctcctgcctatgctgagata

SEQ ID NO: 9391 - DNA, 20 bp, Homo Sapiens
tcctgcctatgctgagatac

SEQ ID NO: 9392 - DNA, 20 bp, Homo Sapiens
cctgcctatgctgagatacg

SEQ ID NO: 9393 - DNA, 20 bp, Homo Sapiens
ctgcctatgctgagatacgc

SEQ ID NO: 9394 - DNA, 20 bp, Homo Sapiens
tgcctatgctgagatacgca

SEQ ID NO: 9395 - DNA, 20 bp, Homo Sapiens
gcctatgctgagatacgcac

SEQ ID NO: 9396 - DNA, 20 bp, Homo Sapiens
cctatgctgagatacgcact

SEQ ID NO: 9397 - DNA, 20 bp, Homo Sapiens
ctatgctgagatacgcactc

SEQ ID NO: 9398 - DNA, 20 bp, Homo Sapiens
tatgctgagatacgcactca

SEQ ID NO: 9399 - DNA, 20 bp, Homo Sapiens
atgctgagatacgcactcag

SEQ ID NO: 9400 - DNA, 20 bp, Homo Sapiens
tgctgagatacgcactcagc

SEQ ID NO: 9401 - DNA, 20 bp, Homo Sapiens
gctgagatacgcactcagct

SEQ ID NO: 9402 - DNA, 20 bp, Homo Sapiens
ctgagatacgcactcagctc

SEQ ID NO: 9403 - DNA, 20 bp, Homo Sapiens
tgagatacgcactcagctcc

SEQ ID NO: 9404 - DNA, 20 bp, Homo Sapiens
gagatacgcactcagctcca

SEQ ID NO: 9405 - DNA, 20 bp, Homo Sapiens
agatacgcactcagctccat

SEQ ID NO: 9406 - DNA, 20 bp, Homo Sapiens
gatacgcactcagctccatg

SEQ ID NO: 9407 - DNA, 20 bp, Homo Sapiens
atacgcactcagctccatgt

SEQ ID NO: 9408 - DNA, 20 bp, Homo Sapiens
tacgcactcagctccatgtc

SEQ ID NO: 9409 - DNA, 20 bp, Homo Sapiens
acgcactcagctccatgtct

SEQ ID NO: 9410 - DNA, 20 bp, Homo Sapiens
cgcactcagctccatgtctt

SEQ ID NO: 9411 - DNA, 20 bp, Homo Sapiens
gcactcagctccatgtcttg

SEQ ID NO: 9412 - DNA, 20 bp, Homo Sapiens
cactcagctccatgtcttgt

SEQ ID NO: 9413 - DNA, 20 bp, Homo Sapiens
actcagctccatgtcttgta

SEQ ID NO: 9414 - DNA, 20 bp, Homo Sapiens
ctcagctccatgtcttgtac

SEQ ID NO: 9415 - DNA, 20 bp, Homo Sapiens
tcagctccatgtcttgtaca

SEQ ID NO: 9416 - DNA, 20 bp, Homo Sapiens
cagctccatgtcttgtacac

SEQ ID NO: 9417 - DNA, 20 bp, Homo Sapiens
agctccatgtcttgtacaca

SEQ ID NO: 9418 - DNA, 20 bp, Homo Sapiens
gctccatgtcttgtacacac

SEQ ID NO: 9419 - DNA, 20 bp, Homo Sapiens
ctccatgtcttgtacacaca

SEQ ID NO: 9420 - DNA, 20 bp, Homo Sapiens
tccatgtcttgtacacacag

SEQ ID NO: 9421 - DNA, 20 bp, Homo Sapiens
ccatgtcttgtacacacaga

SEQ ID NO: 9422 - DNA, 20 bp, Homo Sapiens
catgtcttgtacacacagaa

SEQ ID NO: 9423 - DNA, 20 bp, Homo Sapiens
atgtcttgtacacacagaaa

SEQ ID NO: 9424 - DNA, 20 bp, Homo Sapiens
tgtcttgtacacacagaaac

SEQ ID NO: 9425 - DNA, 20 bp, Homo Sapiens
gtcttgtacacacagaaaca

SEQ ID NO: 9426 - DNA, 20 bp, Homo Sapiens
tcttgtacacacagaaacat

SEQ ID NO: 9427 - DNA, 20 bp, Homo Sapiens
cttgtacacacagaaacatt

SEQ ID NO: 9428 - DNA, 20 bp, Homo Sapiens
ttgtacacacagaaacattg

SEQ ID NO: 9429 - DNA, 20 bp, Homo Sapiens
tgtacacacagaaacattgc

SEQ ID NO: 9430 - DNA, 20 bp, Homo Sapiens
gtacacacagaaacattgct

SEQ ID NO: 9431 - DNA, 20 bp, Homo Sapiens
tacacacagaaacattgctg

SEQ ID NO: 9432 - DNA, 20 bp, Homo Sapiens
acacacagaaacattgctgg

SEQ ID NO: 9433 - DNA, 20 bp, Homo Sapiens
cacacagaaacattgctggt

SEQ ID NO: 9434 - DNA, 20 bp, Homo Sapiens
acacagaaacattgctggtt

SEQ ID NO: 9435 - DNA, 20 bp, Homo Sapiens
cacagaaacattgctggttt

SEQ ID NO: 9436 - DNA, 20 bp, Homo Sapiens
acagaaacattgctggtttc

SEQ ID NO: 9437 - DNA, 20 bp, Homo Sapiens
cagaaacattgctggtttca

SEQ ID NO: 9438 - DNA, 20 bp, Homo Sapiens
agaaacattgctggtttcaa

SEQ ID NO: 9439 - DNA, 20 bp, Homo Sapiens
gaaacattgctggtttcaag

SEQ ID NO: 9440 - DNA, 20 bp, Homo Sapiens
aaacattgctggtttcaaga

SEQ ID NO: 9441 - DNA, 20 bp, Homo Sapiens
aacattgctggtttcaagaa

SEQ ID NO: 9442 - DNA, 20 bp, Homo Sapiens
acattgctggtttcaagaaa

SEQ ID NO: 9443 - DNA, 20 bp, Homo Sapiens
cattgctggtttcaagaaat

SEQ ID NO: 9444 - DNA, 20 bp, Homo Sapiens
attgctggtttcaagaaatg

SEQ ID NO: 9445 - DNA, 20 bp, Homo Sapiens
ttgctggtttcaagaaatga

SEQ ID NO: 9446 - DNA, 20 bp, Homo Sapiens
tgctggtttcaagaaatgag

SEQ ID NO: 9447 - DNA, 20 bp, Homo Sapiens
gctggtttcaagaaatgagg

SEQ ID NO: 9448 - DNA, 20 bp, Homo Sapiens
ctggtttcaagaaatgaggt

SEQ ID NO: 9449 - DNA, 20 bp, Homo Sapiens
tggtttcaagaaatgaggtg

SEQ ID NO: 9450 - DNA, 20 bp, Homo Sapiens
ggtttcaagaaatgaggtga

SEQ ID NO: 9451 - DNA, 20 bp, Homo Sapiens
gtttcaagaaatgaggtgat

SEQ ID NO: 9452 - DNA, 20 bp, Homo Sapiens
tttcaagaaatgaggtgatc

SEQ ID NO: 9453 - DNA, 20 bp, Homo Sapiens
ttcaagaaatgaggtgatcc

SEQ ID NO: 9454 - DNA, 20 bp, Homo Sapiens
tcaagaaatgaggtgatcct

SEQ ID NO: 9455 - DNA, 20 bp, Homo Sapiens
caagaaatgaggtgatccta

SEQ ID NO: 9456 - DNA, 20 bp, Homo Sapiens
aagaaatgaggtgatcctat

SEQ ID NO: 9457 - DNA, 20 bp, Homo Sapiens
agaaatgaggtgatcctatt

SEQ ID NO: 9458 - DNA, 20 bp, Homo Sapiens
gaaatgaggtgatcctatta

SEQ ID NO: 9459 - DNA, 20 bp, Homo Sapiens
aaatgaggtgatcctattat

SEQ ID NO: 9460 - DNA, 20 bp, Homo Sapiens
aatgaggtgatcctattatc

SEQ ID NO: 9461 - DNA, 20 bp, Homo Sapiens
atgaggtgatcctattatca

SEQ ID NO: 9462 - DNA, 20 bp, Homo Sapiens
tgaggtgatcctattatcaa

SEQ ID NO: 9463 - DNA, 20 bp, Homo Sapiens
gaggtgatcctattatcaaa

SEQ ID NO: 9464 - DNA, 20 bp, Homo Sapiens
aggtgatcctattatcaaat

SEQ ID NO: 9465 - DNA, 20 bp, Homo Sapiens
ggtgatcctattatcaaatt

SEQ ID NO: 9466 - DNA, 20 bp, Homo Sapiens
gtgatcctattatcaaattc

SEQ ID NO: 9467 - DNA, 20 bp, Homo Sapiens
tgatcctattatcaaattca

SEQ ID NO: 9468 - DNA, 20 bp, Homo Sapiens
gatcctattatcaaattcaa

SEQ ID NO: 9469 - DNA, 20 bp, Homo Sapiens
atcctattatcaaattcaat

SEQ ID NO: 9470 - DNA, 20 bp, Homo Sapiens
tcctattatcaaattcaatc

SEQ ID NO: 9471 - DNA, 20 bp, Homo Sapiens
cctattatcaaattcaatct

SEQ ID NO: 9472 - DNA, 20 bp, Homo Sapiens
ctattatcaaattcaatctg

SEQ ID NO: 9473 - DNA, 20 bp, Homo Sapiens
tattatcaaattcaatctga

SEQ ID NO: 9474 - DNA, 20 bp, Homo Sapiens
attatcaaattcaatctgat

SEQ ID NO: 9475 - DNA, 20 bp, Homo Sapiens
ttatcaaattcaatctgatg

SEQ ID NO: 9476 - DNA, 20 bp, Homo Sapiens
tatcaaattcaatctgatgt

SEQ ID NO: 9477 - DNA, 20 bp, Homo Sapiens
atcaaattcaatctgatgtc

SEQ ID NO: 9478 - DNA, 20 bp, Homo Sapiens
tcaaattcaatctgatgtca

SEQ ID NO: 9479 - DNA, 20 bp, Homo Sapiens
caaattcaatctgatgtcaa

SEQ ID NO: 9480 - DNA, 20 bp, Homo Sapiens
aaattcaatctgatgtcaaa

SEQ ID NO: 9481 - DNA, 20 bp, Homo Sapiens
aattcaatctgatgtcaaat

SEQ ID NO: 9482 - DNA, 20 bp, Homo Sapiens
attcaatctgatgtcaaata

SEQ ID NO: 9483 - DNA, 20 bp, Homo Sapiens
ttcaatctgatgtcaaatag

SEQ ID NO: 9484 - DNA, 20 bp, Homo Sapiens
tcaatctgatgtcaaatagc

SEQ ID NO: 9485 - DNA, 20 bp, Homo Sapiens
caatctgatgtcaaatagca

SEQ ID NO: 9486 - DNA, 20 bp, Homo Sapiens
aatctgatgtcaaatagcac

SEQ ID NO: 9487 - DNA, 20 bp, Homo Sapiens
atctgatgtcaaatagcact

SEQ ID NO: 9488 - DNA, 20 bp, Homo Sapiens
tctgatgtcaaatagcacta

SEQ ID NO: 9489 - DNA, 20 bp, Homo Sapiens
ctgatgtcaaatagcactaa

SEQ ID NO: 9490 - DNA, 20 bp, Homo Sapiens
tgatgtcaaatagcactaag

SEQ ID NO: 9491 - DNA, 20 bp, Homo Sapiens
gatgtcaaatagcactaaga

SEQ ID NO: 9492 - DNA, 20 bp, Homo Sapiens
atgtcaaatagcactaagaa

SEQ ID NO: 9493 - DNA, 20 bp, Homo Sapiens
tgtcaaatagcactaagaag

SEQ ID NO: 9494 - DNA, 20 bp, Homo Sapiens
gtcaaatagcactaagaagt

SEQ ID NO: 9495 - DNA, 20 bp, Homo Sapiens
tcaaatagcactaagaagtt

SEQ ID NO: 9496 - DNA, 20 bp, Homo Sapiens
caaatagcactaagaagtta

SEQ ID NO: 9497 - DNA, 20 bp, Homo Sapiens
aaatagcactaagaagttat

SEQ ID NO: 9498 - DNA, 20 bp, Homo Sapiens
aatagcactaagaagttatt

SEQ ID NO: 9499 - DNA, 20 bp, Homo Sapiens
atagcactaagaagttattg

SEQ ID NO: 9500 - DNA, 20 bp, Homo Sapiens
tagcactaagaagttattgt

SEQ ID NO: 9501 - DNA, 20 bp, Homo Sapiens
agcactaagaagttattgtg

SEQ ID NO: 9502 - DNA, 20 bp, Homo Sapiens
gcactaagaagttattgtgc

SEQ ID NO: 9503 - DNA, 20 bp, Homo Sapiens
cactaagaagttattgtgcc

SEQ ID NO: 9504 - DNA, 20 bp, Homo Sapiens
actaagaagttattgtgcct

SEQ ID NO: 9505 - DNA, 20 bp, Homo Sapiens
ctaagaagttattgtgcctt

SEQ ID NO: 9506 - DNA, 20 bp, Homo Sapiens
taagaagttattgtgcctta

SEQ ID NO: 9507 - DNA, 20 bp, Homo Sapiens
aagaagttattgtgccttat

SEQ ID NO: 9508 - DNA, 20 bp, Homo Sapiens
agaagttattgtgccttatg

SEQ ID NO: 9509 - DNA, 20 bp, Homo Sapiens
gaagttattgtgccttatga

SEQ ID NO: 9510 - DNA, 20 bp, Homo Sapiens
aagttattgtgccttatgaa

SEQ ID NO: 9511 - DNA, 20 bp, Homo Sapiens
agttattgtgccttatgaaa

SEQ ID NO: 9512 - DNA, 20 bp, Homo Sapiens
gttattgtgccttatgaaaa

SEQ ID NO: 9513 - DNA, 20 bp, Homo Sapiens
ttattgtgccttatgaaaaa

SEQ ID NO: 9514 - DNA, 20 bp, Homo Sapiens
tattgtgccttatgaaaaat

SEQ ID NO: 9515 - DNA, 20 bp, Homo Sapiens
attgtgccttatgaaaaata

SEQ ID NO: 9516 - DNA, 20 bp, Homo Sapiens
ttgtgccttatgaaaaataa

SEQ ID NO: 9517 - DNA, 20 bp, Homo Sapiens
tgtgccttatgaaaaataat

SEQ ID NO: 9518 - DNA, 20 bp, Homo Sapiens
gtgccttatgaaaaataatg

SEQ ID NO: 9519 - DNA, 20 bp, Homo Sapiens
tgccttatgaaaaataatga

SEQ ID NO: 9520 - DNA, 20 bp, Homo Sapiens
gccttatgaaaaataatgat

SEQ ID NO: 9521 - DNA, 20 bp, Homo Sapiens
ccttatgaaaaataatgatc

SEQ ID NO: 9522 - DNA, 20 bp, Homo Sapiens
cttatgaaaaataatgatct

SEQ ID NO: 9523 - DNA, 20 bp, Homo Sapiens
ttatgaaaaataatgatctc

SEQ ID NO: 9524 - DNA, 20 bp, Homo Sapiens
tatgaaaaataatgatctct

SEQ ID NO: 9525 - DNA, 20 bp, Homo Sapiens
atgaaaaataatgatctctg

SEQ ID NO: 9526 - DNA, 20 bp, Homo Sapiens
tgaaaaataatgatctctgt

SEQ ID NO: 9527 - DNA, 20 bp, Homo Sapiens
gaaaaataatgatctctgtc

SEQ ID NO: 9528 - DNA, 20 bp, Homo Sapiens
aaaaataatgatctctgtct

SEQ ID NO: 9529 - DNA, 20 bp, Homo Sapiens
aaaataatgatctctgtcta

SEQ ID NO: 9530 - DNA, 20 bp, Homo Sapiens
aaataatgatctctgtctag

SEQ ID NO: 9531 - DNA, 20 bp, Homo Sapiens
aataatgatctctgtctaga

SEQ ID NO: 9532 - DNA, 20 bp, Homo Sapiens
ataatgatctctgtctagaa

SEQ ID NO: 9533 - DNA, 20 bp, Homo Sapiens
taatgatctctgtctagaaa

SEQ ID NO: 9534 - DNA, 20 bp, Homo Sapiens
aatgatctctgtctagaaat

SEQ ID NO: 9535 - DNA, 20 bp, Homo Sapiens
atgatctctgtctagaaata

SEQ ID NO: 9536 - DNA, 20 bp, Homo Sapiens
tgatctctgtctagaaatac

SEQ ID NO: 9537 - DNA, 20 bp, Homo Sapiens
gatctctgtctagaaatacc

SEQ ID NO: 9538 - DNA, 20 bp, Homo Sapiens
atctctgtctagaaatacca

SEQ ID NO: 9539 - DNA, 20 bp, Homo Sapiens
tctctgtctagaaataccat

SEQ ID NO: 9540 - DNA, 20 bp, Homo Sapiens
ctctgtctagaaataccata

SEQ ID NO: 9541 - DNA, 20 bp, Homo Sapiens
tctgtctagaaataccatag

SEQ ID NO: 9542 - DNA, 20 bp, Homo Sapiens
ctgtctagaaataccataga

SEQ ID NO: 9543 - DNA, 20 bp, Homo Sapiens
tgtctagaaataccatagac

SEQ ID NO: 9544 - DNA, 20 bp, Homo Sapiens
gtctagaaataccatagacc

SEQ ID NO: 9545 - DNA, 20 bp, Homo Sapiens
tctagaaataccatagacca

SEQ ID NO: 9546 - DNA, 20 bp, Homo Sapiens
ctagaaataccatagaccat

SEQ ID NO: 9547 - DNA, 20 bp, Homo Sapiens
tagaaataccatagaccata

SEQ ID NO: 9548 - DNA, 20 bp, Homo Sapiens
agaaataccatagaccatat

SEQ ID NO: 9549 - DNA, 20 bp, Homo Sapiens
gaaataccatagaccatata

SEQ ID NO: 9550 - DNA, 20 bp, Homo Sapiens
aaataccatagaccatatat

SEQ ID NO: 9551 - DNA, 20 bp, Homo Sapiens
aataccatagaccatatata

SEQ ID NO: 9552 - DNA, 20 bp, Homo Sapiens
ataccatagaccatatatag

SEQ ID NO: 9553 - DNA, 20 bp, Homo Sapiens
taccatagaccatatatagt

SEQ ID NO: 9554 - DNA, 20 bp, Homo Sapiens
accatagaccatatatagtc

SEQ ID NO: 9555 - DNA, 20 bp, Homo Sapiens
ccatagaccatatatagtct

SEQ ID NO: 9556 - DNA, 20 bp, Homo Sapiens
catagaccatatatagtctc

SEQ ID NO: 9557 - DNA, 20 bp, Homo Sapiens
atagaccatatatagtctca

SEQ ID NO: 9558 - DNA, 20 bp, Homo Sapiens
tagaccatatatagtctcac

SEQ ID NO: 9559 - DNA, 20 bp, Homo Sapiens
agaccatatatagtctcaca

SEQ ID NO: 9560 - DNA, 20 bp, Homo Sapiens
gaccatatatagtctcacat

SEQ ID NO: 9561 - DNA, 20 bp, Homo Sapiens
accatatatagtctcacatt

SEQ ID NO: 9562 - DNA, 20 bp, Homo Sapiens
ccatatatagtctcacattg

SEQ ID NO: 9563 - DNA, 20 bp, Homo Sapiens
catatatagtctcacattga

SEQ ID NO: 9564 - DNA, 20 bp, Homo Sapiens
atatatagtctcacattgat

SEQ ID NO: 9565 - DNA, 20 bp, Homo Sapiens
tatatagtctcacattgata

SEQ ID NO: 9566 - DNA, 20 bp, Homo Sapiens
atatagtctcacattgataa

SEQ ID NO: 9567 - DNA, 20 bp, Homo Sapiens
tatagtctcacattgataat

SEQ ID NO: 9568 - DNA, 20 bp, Homo Sapiens
atagtctcacattgataatt

SEQ ID NO: 9569 - DNA, 20 bp, Homo Sapiens
tagtctcacattgataattg

SEQ ID NO: 9570 - DNA, 20 bp, Homo Sapiens
agtctcacattgataattga

SEQ ID NO: 9571 - DNA, 20 bp, Homo Sapiens
gtctcacattgataattgaa

SEQ ID NO: 9572 - DNA, 20 bp, Homo Sapiens
tctcacattgataattgaaa

SEQ ID NO: 9573 - DNA, 20 bp, Homo Sapiens
ctcacattgataattgaaac

SEQ ID NO: 9574 - DNA, 20 bp, Homo Sapiens
tcacattgataattgaaact

SEQ ID NO: 9575 - DNA, 20 bp, Homo Sapiens
cacattgataattgaaacta

SEQ ID NO: 9576 - DNA, 20 bp, Homo Sapiens
acattgataattgaaactag

SEQ ID NO: 9577 - DNA, 20 bp, Homo Sapiens
cattgataattgaaactaga

SEQ ID NO: 9578 - DNA, 20 bp, Homo Sapiens
attgataattgaaactagaa

SEQ ID NO: 9579 - DNA, 20 bp, Homo Sapiens
ttgataattgaaactagaag

SEQ ID NO: 9580 - DNA, 20 bp, Homo Sapiens
tgataattgaaactagaagg

SEQ ID NO: 9581 - DNA, 20 bp, Homo Sapiens
gataattgaaactagaaggg

SEQ ID NO: 9582 - DNA, 20 bp, Homo Sapiens
ataattgaaactagaagggt

SEQ ID NO: 9583 - DNA, 20 bp, Homo Sapiens
taattgaaactagaagggtc

SEQ ID NO: 9584 - DNA, 20 bp, Homo Sapiens
aattgaaactagaagggtct

SEQ ID NO: 9585 - DNA, 20 bp, Homo Sapiens
attgaaactagaagggtcta

SEQ ID NO: 9586 - DNA, 20 bp, Homo Sapiens
ttgaaactagaagggtctat

SEQ ID NO: 9587 - DNA, 20 bp, Homo Sapiens
tgaaactagaagggtctata

SEQ ID NO: 9588 - DNA, 20 bp, Homo Sapiens
gaaactagaagggtctataa

SEQ ID NO: 9589 - DNA, 20 bp, Homo Sapiens
aaactagaagggtctataat

SEQ ID NO: 9590 - DNA, 20 bp, Homo Sapiens
aactagaagggtctataatc

SEQ ID NO: 9591 - DNA, 20 bp, Homo Sapiens
actagaagggtctataatca

SEQ ID NO: 9592 - DNA, 20 bp, Homo Sapiens
ctagaagggtctataatcag

SEQ ID NO: 9593 - DNA, 20 bp, Homo Sapiens
tagaagggtctataatcagc

SEQ ID NO: 9594 - DNA, 20 bp, Homo Sapiens
agaagggtctataatcagcc

SEQ ID NO: 9595 - DNA, 20 bp, Homo Sapiens
gaagggtctataatcagcct

SEQ ID NO: 9596 - DNA, 20 bp, Homo Sapiens
aagggtctataatcagccta

SEQ ID NO: 9597 - DNA, 20 bp, Homo Sapiens
agggtctataatcagcctat

SEQ ID NO: 9598 - DNA, 20 bp, Homo Sapiens
gggtctataatcagcctatg

SEQ ID NO: 9599 - DNA, 20 bp, Homo Sapiens
ggtctataatcagcctatgc

SEQ ID NO: 9600 - DNA, 20 bp, Homo Sapiens
gtctataatcagcctatgcc

SEQ ID NO: 9601 - DNA, 20 bp, Homo Sapiens
tctataatcagcctatgcca

SEQ ID NO: 9602 - DNA, 20 bp, Homo Sapiens
ctataatcagcctatgccag

SEQ ID NO: 9603 - DNA, 20 bp, Homo Sapiens
tataatcagcctatgccagg

SEQ ID NO: 9604 - DNA, 20 bp, Homo Sapiens
ataatcagcctatgccaggg

SEQ ID NO: 9605 - DNA, 20 bp, Homo Sapiens
taatcagcctatgccagggc

SEQ ID NO: 9606 - DNA, 20 bp, Homo Sapiens
aatcagcctatgccagggct

SEQ ID NO: 9607 - DNA, 20 bp, Homo Sapiens
atcagcctatgccagggctt

SEQ ID NO: 9608 - DNA, 20 bp, Homo Sapiens
tcagcctatgccagggcttc

SEQ ID NO: 9609 - DNA, 20 bp, Homo Sapiens
cagcctatgccagggcttca

SEQ ID NO: 9610 - DNA, 20 bp, Homo Sapiens
agcctatgccagggcttcaa

SEQ ID NO: 9611 - DNA, 20 bp, Homo Sapiens
gcctatgccagggcttcaat

SEQ ID NO: 9612 - DNA, 20 bp, Homo Sapiens
cctatgccagggcttcaatg

SEQ ID NO: 9613 - DNA, 20 bp, Homo Sapiens
ctatgccagggcttcaatgg

SEQ ID NO: 9614 - DNA, 20 bp, Homo Sapiens
tatgccagggcttcaatgga

SEQ ID NO: 9615 - DNA, 20 bp, Homo Sapiens
atgccagggcttcaatggaa

SEQ ID NO: 9616 - DNA, 20 bp, Homo Sapiens
tgccagggcttcaatggaat

SEQ ID NO: 9617 - DNA, 20 bp, Homo Sapiens
gccagggcttcaatggaata

SEQ ID NO: 9618 - DNA, 20 bp, Homo Sapiens
ccagggcttcaatggaatag

SEQ ID NO: 9619 - DNA, 20 bp, Homo Sapiens
cagggcttcaatggaatagt

SEQ ID NO: 9620 - DNA, 20 bp, Homo Sapiens
agggcttcaatggaatagta

SEQ ID NO: 9621 - DNA, 20 bp, Homo Sapiens
gggcttcaatggaatagtat

SEQ ID NO: 9622 - DNA, 20 bp, Homo Sapiens
ggcttcaatggaatagtatc

SEQ ID NO: 9623 - DNA, 20 bp, Homo Sapiens
gcttcaatggaatagtatcc

SEQ ID NO: 9624 - DNA, 20 bp, Homo Sapiens
cttcaatggaatagtatccc

SEQ ID NO: 9625 - DNA, 20 bp, Homo Sapiens
ttcaatggaatagtatcccc

SEQ ID NO: 9626 - DNA, 20 bp, Homo Sapiens
tcaatggaatagtatcccct

SEQ ID NO: 9627 - DNA, 20 bp, Homo Sapiens
caatggaatagtatcccctt

SEQ ID NO: 9628 - DNA, 20 bp, Homo Sapiens
aatggaatagtatcccctta

SEQ ID NO: 9629 - DNA, 20 bp, Homo Sapiens
atggaatagtatccccttat

SEQ ID NO: 9630 - DNA, 20 bp, Homo Sapiens
tggaatagtatccccttatg

SEQ ID NO: 9631 - DNA, 20 bp, Homo Sapiens
ggaatagtatccccttatgt

SEQ ID NO: 9632 - DNA, 20 bp, Homo Sapiens
gaatagtatccccttatgtt

SEQ ID NO: 9633 - DNA, 20 bp, Homo Sapiens
aatagtatccccttatgttt

SEQ ID NO: 9634 - DNA, 20 bp, Homo Sapiens
atagtatccccttatgttta

SEQ ID NO: 9635 - DNA, 20 bp, Homo Sapiens
tagtatccccttatgtttag

SEQ ID NO: 9636 - DNA, 20 bp, Homo Sapiens
agtatccccttatgtttagt

SEQ ID NO: 9637 - DNA, 20 bp, Homo Sapiens
gtatccccttatgtttagtt

SEQ ID NO: 9638 - DNA, 20 bp, Homo Sapiens
tatccccttatgtttagttg

SEQ ID NO: 9639 - DNA, 20 bp, Homo Sapiens
atccccttatgtttagttga

SEQ ID NO: 9640 - DNA, 20 bp, Homo Sapiens
tccccttatgtttagttgaa

SEQ ID NO: 9641 - DNA, 20 bp, Homo Sapiens
ccccttatgtttagttgaaa

SEQ ID NO: 9642 - DNA, 20 bp, Homo Sapiens
cccttatgtttagttgaaat

SEQ ID NO: 9643 - DNA, 20 bp, Homo Sapiens
ccttatgtttagttgaaatg

SEQ ID NO: 9644 - DNA, 20 bp, Homo Sapiens
cttatgtttagttgaaatgt

SEQ ID NO: 9645 - DNA, 20 bp, Homo Sapiens
ttatgtttagttgaaatgtc

SEQ ID NO: 9646 - DNA, 20 bp, Homo Sapiens
tatgtttagttgaaatgtcc

SEQ ID NO: 9647 - DNA, 20 bp, Homo Sapiens
atgtttagttgaaatgtccc

SEQ ID NO: 9648 - DNA, 20 bp, Homo Sapiens
tgtttagttgaaatgtcccc

SEQ ID NO: 9649 - DNA, 20 bp, Homo Sapiens
gtttagttgaaatgtcccct

SEQ ID NO: 9650 - DNA, 20 bp, Homo Sapiens
tttagttgaaatgtcccctt

SEQ ID NO: 9651 - DNA, 20 bp, Homo Sapiens
ttagttgaaatgtcccctta

SEQ ID NO: 9652 - DNA, 20 bp, Homo Sapiens
tagttgaaatgtccccttaa

SEQ ID NO: 9653 - DNA, 20 bp, Homo Sapiens
agttgaaatgtccccttaac

SEQ ID NO: 9654 - DNA, 20 bp, Homo Sapiens
gttgaaatgtccccttaact

SEQ ID NO: 9655 - DNA, 20 bp, Homo Sapiens
ttgaaatgtccccttaactt

SEQ ID NO: 9656 - DNA, 20 bp, Homo Sapiens
tgaaatgtccccttaacttg

SEQ ID NO: 9657 - DNA, 20 bp, Homo Sapiens
gaaatgtccccttaacttga

SEQ ID NO: 9658 - DNA, 20 bp, Homo Sapiens
aaatgtccccttaacttgat

SEQ ID NO: 9659 - DNA, 20 bp, Homo Sapiens
aatgtccccttaacttgata

SEQ ID NO: 9660 - DNA, 20 bp, Homo Sapiens
atgtccccttaacttgatat

SEQ ID NO: 9661 - DNA, 20 bp, Homo Sapiens
tgtccccttaacttgatata

SEQ ID NO: 9662 - DNA, 20 bp, Homo Sapiens
gtccccttaacttgatataa

SEQ ID NO: 9663 - DNA, 20 bp, Homo Sapiens
tccccttaacttgatataat

SEQ ID NO: 9664 - DNA, 20 bp, Homo Sapiens
ccccttaacttgatataatg

SEQ ID NO: 9665 - DNA, 20 bp, Homo Sapiens
cccttaacttgatataatgt

SEQ ID NO: 9666 - DNA, 20 bp, Homo Sapiens
ccttaacttgatataatgtg

SEQ ID NO: 9667 - DNA, 20 bp, Homo Sapiens
cttaacttgatataatgtgt

SEQ ID NO: 9668 - DNA, 20 bp, Homo Sapiens
ttaacttgatataatgtgtt

SEQ ID NO: 9669 - DNA, 20 bp, Homo Sapiens
taacttgatataatgtgtta

SEQ ID NO: 9670 - DNA, 20 bp, Homo Sapiens
aacttgatataatgtgttat

SEQ ID NO: 9671 - DNA, 20 bp, Homo Sapiens
acttgatataatgtgttatg

SEQ ID NO: 9672 - DNA, 20 bp, Homo Sapiens
cttgatataatgtgttatgc

SEQ ID NO: 9673 - DNA, 20 bp, Homo Sapiens
ttgatataatgtgttatgct

SEQ ID NO: 9674 - DNA, 20 bp, Homo Sapiens
tgatataatgtgttatgctt

SEQ ID NO: 9675 - DNA, 20 bp, Homo Sapiens
gatataatgtgttatgctta

SEQ ID NO: 9676 - DNA, 20 bp, Homo Sapiens
atataatgtgttatgcttat

SEQ ID NO: 9677 - DNA, 20 bp, Homo Sapiens
tataatgtgttatgcttatg

SEQ ID NO: 9678 - DNA, 20 bp, Homo Sapiens
ataatgtgttatgcttatgg

SEQ ID NO: 9679 - DNA, 20 bp, Homo Sapiens
taatgtgttatgcttatggc

SEQ ID NO: 9680 - DNA, 20 bp, Homo Sapiens
aatgtgttatgcttatggcg

SEQ ID NO: 9681 - DNA, 20 bp, Homo Sapiens
atgtgttatgcttatggcgc

SEQ ID NO: 9682 - DNA, 20 bp, Homo Sapiens
tgtgttatgcttatggcgct

SEQ ID NO: 9683 - DNA, 20 bp, Homo Sapiens
gtgttatgcttatggcgctg

SEQ ID NO: 9684 - DNA, 20 bp, Homo Sapiens
tgttatgcttatggcgctgt

SEQ ID NO: 9685 - DNA, 20 bp, Homo Sapiens
gttatgcttatggcgctgtg

SEQ ID NO: 9686 - DNA, 20 bp, Homo Sapiens
ttatgcttatggcgctgtgg

SEQ ID NO: 9687 - DNA, 20 bp, Homo Sapiens
tatgcttatggcgctgtgga

SEQ ID NO: 9688 - DNA, 20 bp, Homo Sapiens
atgcttatggcgctgtggac

SEQ ID NO: 9689 - DNA, 20 bp, Homo Sapiens
tgcttatggcgctgtggaca

SEQ ID NO: 9690 - DNA, 20 bp, Homo Sapiens
gcttatggcgctgtggacaa

SEQ ID NO: 9691 - DNA, 20 bp, Homo Sapiens
cttatggcgctgtggacaat

SEQ ID NO: 9692 - DNA, 20 bp, Homo Sapiens
ttatggcgctgtggacaatc

SEQ ID NO: 9693 - DNA, 20 bp, Homo Sapiens
tatggcgctgtggacaatct

SEQ ID NO: 9694 - DNA, 20 bp, Homo Sapiens
atggcgctgtggacaatctg

SEQ ID NO: 9695 - DNA, 20 bp, Homo Sapiens
tggcgctgtggacaatctga

SEQ ID NO: 9696 - DNA, 20 bp, Homo Sapiens
ggcgctgtggacaatctgat

SEQ ID NO: 9697 - DNA, 20 bp, Homo Sapiens
gcgctgtggacaatctgatt

SEQ ID NO: 9698 - DNA, 20 bp, Homo Sapiens
cgctgtggacaatctgattt

SEQ ID NO: 9699 - DNA, 20 bp, Homo Sapiens
gctgtggacaatctgatttt

SEQ ID NO: 9700 - DNA, 20 bp, Homo Sapiens
ctgtggacaatctgattttt

SEQ ID NO: 9701 - DNA, 20 bp, Homo Sapiens
tgtggacaatctgatttttc

SEQ ID NO: 9702 - DNA, 20 bp, Homo Sapiens
gtggacaatctgatttttca

SEQ ID NO: 9703 - DNA, 20 bp, Homo Sapiens
tggacaatctgatttttcat

SEQ ID NO: 9704 - DNA, 20 bp, Homo Sapiens
ggacaatctgatttttcatg

SEQ ID NO: 9705 - DNA, 20 bp, Homo Sapiens
gacaatctgatttttcatgt

SEQ ID NO: 9706 - DNA, 20 bp, Homo Sapiens
acaatctgatttttcatgtc

SEQ ID NO: 9707 - DNA, 20 bp, Homo Sapiens
caatctgatttttcatgtca

SEQ ID NO: 9708 - DNA, 20 bp, Homo Sapiens
aatctgatttttcatgtcaa

SEQ ID NO: 9709 - DNA, 20 bp, Homo Sapiens
atctgatttttcatgtcaac

SEQ ID NO: 9710 - DNA, 20 bp, Homo Sapiens
tctgatttttcatgtcaact

SEQ ID NO: 9711 - DNA, 20 bp, Homo Sapiens
ctgatttttcatgtcaactt

SEQ ID NO: 9712 - DNA, 20 bp, Homo Sapiens
tgatttttcatgtcaacttt

SEQ ID NO: 9713 - DNA, 20 bp, Homo Sapiens
gatttttcatgtcaactttc

SEQ ID NO: 9714 - DNA, 20 bp, Homo Sapiens
atttttcatgtcaactttcc

SEQ ID NO: 9715 - DNA, 20 bp, Homo Sapiens
tttttcatgtcaactttcca

SEQ ID NO: 9716 - DNA, 20 bp, Homo Sapiens
ttttcatgtcaactttccag

SEQ ID NO: 9717 - DNA, 20 bp, Homo Sapiens
tttcatgtcaactttccaga

SEQ ID NO: 9718 - DNA, 20 bp, Homo Sapiens
ttcatgtcaactttccagat

SEQ ID NO: 9719 - DNA, 20 bp, Homo Sapiens
tcatgtcaactttccagatg

SEQ ID NO: 9720 - DNA, 20 bp, Homo Sapiens
catgtcaactttccagatga

SEQ ID NO: 9721 - DNA, 20 bp, Homo Sapiens
atgtcaactttccagatgat

SEQ ID NO: 9722 - DNA, 20 bp, Homo Sapiens
tgtcaactttccagatgatt

SEQ ID NO: 9723 - DNA, 20 bp, Homo Sapiens
gtcaactttccagatgattt

SEQ ID NO: 9724 - DNA, 20 bp, Homo Sapiens
tcaactttccagatgatttg

SEQ ID NO: 9725 - DNA, 20 bp, Homo Sapiens
caactttccagatgatttgt

SEQ ID NO: 9726 - DNA, 20 bp, Homo Sapiens
aactttccagatgatttgta

SEQ ID NO: 9727 - DNA, 20 bp, Homo Sapiens
actttccagatgatttgtaa

SEQ ID NO: 9728 - DNA, 20 bp, Homo Sapiens
ctttccagatgatttgtaac

SEQ ID NO: 9729 - DNA, 20 bp, Homo Sapiens
tttccagatgatttgtaact

SEQ ID NO: 9730 - DNA, 20 bp, Homo Sapiens
ttccagatgatttgtaactt

SEQ ID NO: 9731 - DNA, 20 bp, Homo Sapiens
tccagatgatttgtaacttc

SEQ ID NO: 9732 - DNA, 20 bp, Homo Sapiens
ccagatgatttgtaacttct

SEQ ID NO: 9733 - DNA, 20 bp, Homo Sapiens
cagatgatttgtaacttctc

SEQ ID NO: 9734 - DNA, 20 bp, Homo Sapiens
agatgatttgtaacttctct

SEQ ID NO: 9735 - DNA, 20 bp, Homo Sapiens
gatgatttgtaacttctctg

SEQ ID NO: 9736 - DNA, 20 bp, Homo Sapiens
atgatttgtaacttctctgt

SEQ ID NO: 9737 - DNA, 20 bp, Homo Sapiens
tgatttgtaacttctctgtg

SEQ ID NO: 9738 - DNA, 20 bp, Homo Sapiens
gatttgtaacttctctgtgc

SEQ ID NO: 9739 - DNA, 20 bp, Homo Sapiens
atttgtaacttctctgtgcc

SEQ ID NO: 9740 - DNA, 20 bp, Homo Sapiens
tttgtaacttctctgtgcca

SEQ ID NO: 9741 - DNA, 20 bp, Homo Sapiens
ttgtaacttctctgtgccaa

SEQ ID NO: 9742 - DNA, 20 bp, Homo Sapiens
tgtaacttctctgtgccaaa

SEQ ID NO: 9743 - DNA, 20 bp, Homo Sapiens
gtaacttctctgtgccaaac

SEQ ID NO: 9744 - DNA, 20 bp, Homo Sapiens
taacttctctgtgccaaacc

SEQ ID NO: 9745 - DNA, 20 bp, Homo Sapiens
aacttctctgtgccaaacct

SEQ ID NO: 9746 - DNA, 20 bp, Homo Sapiens
acttctctgtgccaaacctt

SEQ ID NO: 9747 - DNA, 20 bp, Homo Sapiens
cttctctgtgccaaaccttt

SEQ ID NO: 9748 - DNA, 20 bp, Homo Sapiens
ttctctgtgccaaacctttt

SEQ ID NO: 9749 - DNA, 20 bp, Homo Sapiens
tctctgtgccaaacctttta

SEQ ID NO: 9750 - DNA, 20 bp, Homo Sapiens
ctctgtgccaaaccttttat

SEQ ID NO: 9751 - DNA, 20 bp, Homo Sapiens
tctgtgccaaaccttttata

SEQ ID NO: 9752 - DNA, 20 bp, Homo Sapiens
ctgtgccaaaccttttataa

SEQ ID NO: 9753 - DNA, 20 bp, Homo Sapiens
tgtgccaaaccttttataaa

SEQ ID NO: 9754 - DNA, 20 bp, Homo Sapiens
gtgccaaaccttttataaac

SEQ ID NO: 9755 - DNA, 20 bp, Homo Sapiens
tgccaaaccttttataaaca

SEQ ID NO: 9756 - DNA, 20 bp, Homo Sapiens
gccaaaccttttataaacat

SEQ ID NO: 9757 - DNA, 20 bp, Homo Sapiens
ccaaaccttttataaacata

SEQ ID NO: 9758 - DNA, 20 bp, Homo Sapiens
caaaccttttataaacataa

SEQ ID NO: 9759 - DNA, 20 bp, Homo Sapiens
aaaccttttataaacataaa

SEQ ID NO: 9760 - DNA, 20 bp, Homo Sapiens
aaccttttataaacataaat

SEQ ID NO: 9761 - DNA, 20 bp, Homo Sapiens
accttttataaacataaatt

SEQ ID NO: 9762 - DNA, 20 bp, Homo Sapiens
ccttttataaacataaattt

SEQ ID NO: 9763 - DNA, 20 bp, Homo Sapiens
cttttataaacataaatttt

SEQ ID NO: 9764 - DNA, 20 bp, Homo Sapiens
ttttataaacataaattttt

SEQ ID NO: 9765 - DNA, 20 bp, Homo Sapiens
tttataaacataaatttttg

SEQ ID NO: 9766 - DNA, 20 bp, Homo Sapiens
ttataaacataaatttttga

SEQ ID NO: 9767 - DNA, 20 bp, Homo Sapiens
tataaacataaatttttgag

SEQ ID NO: 9768 - DNA, 20 bp, Homo Sapiens
ataaacataaatttttgaga

SEQ ID NO: 9769 - DNA, 20 bp, Homo Sapiens
taaacataaatttttgagat

SEQ ID NO: 9770 - DNA, 20 bp, Homo Sapiens
aaacataaatttttgagata

SEQ ID NO: 9771 - DNA, 20 bp, Homo Sapiens
aacataaatttttgagatat

SEQ ID NO: 9772 - DNA, 20 bp, Homo Sapiens
acataaatttttgagatatg

SEQ ID NO: 9773 - DNA, 20 bp, Homo Sapiens
cataaatttttgagatatgt

SEQ ID NO: 9774 - DNA, 20 bp, Homo Sapiens
ataaatttttgagatatgta

SEQ ID NO: 9775 - DNA, 20 bp, Homo Sapiens
taaatttttgagatatgtat

SEQ ID NO: 9776 - DNA, 20 bp, Homo Sapiens
aaatttttgagatatgtatt

SEQ ID NO: 9777 - DNA, 20 bp, Homo Sapiens
aatttttgagatatgtattt

SEQ ID NO: 9778 - DNA, 20 bp, Homo Sapiens
atttttgagatatgtatttt

SEQ ID NO: 9779 - DNA, 20 bp, Homo Sapiens
tttttgagatatgtatttta

SEQ ID NO: 9780 - DNA, 20 bp, Homo Sapiens
ttttgagatatgtattttaa

SEQ ID NO: 9781 - DNA, 20 bp, Homo Sapiens
tttgagatatgtattttaaa

SEQ ID NO: 9782 - DNA, 20 bp, Homo Sapiens
ttgagatatgtattttaaaa

SEQ ID NO: 9783 - DNA, 20 bp, Homo Sapiens
tgagatatgtattttaaaat

SEQ ID NO: 9784 - DNA, 20 bp, Homo Sapiens
gagatatgtattttaaaatt

SEQ ID NO: 9785 - DNA, 20 bp, Homo Sapiens
agatatgtattttaaaattg

SEQ ID NO: 9786 - DNA, 20 bp, Homo Sapiens
gatatgtattttaaaattgt

SEQ ID NO: 9787 - DNA, 20 bp, Homo Sapiens
atatgtattttaaaattgta

SEQ ID NO: 9788 - DNA, 20 bp, Homo Sapiens
tatgtattttaaaattgtag

SEQ ID NO: 9789 - DNA, 20 bp, Homo Sapiens
atgtattttaaaattgtagc

SEQ ID NO: 9790 - DNA, 20 bp, Homo Sapiens
tgtattttaaaattgtagca

SEQ ID NO: 9791 - DNA, 20 bp, Homo Sapiens
gtattttaaaattgtagcac

SEQ ID NO: 9792 - DNA, 20 bp, Homo Sapiens
tattttaaaattgtagcaca

SEQ ID NO: 9793 - DNA, 20 bp, Homo Sapiens
attttaaaattgtagcacat

SEQ ID NO: 9794 - DNA, 20 bp, Homo Sapiens
ttttaaaattgtagcacatg

SEQ ID NO: 9795 - DNA, 20 bp, Homo Sapiens
tttaaaattgtagcacatgt

SEQ ID NO: 9796 - DNA, 20 bp, Homo Sapiens
ttaaaattgtagcacatgtt

SEQ ID NO: 9797 - DNA, 20 bp, Homo Sapiens
taaaattgtagcacatgttt

SEQ ID NO: 9798 - DNA, 20 bp, Homo Sapiens
aaaattgtagcacatgtttc

SEQ ID NO: 9799 - DNA, 20 bp, Homo Sapiens
aaattgtagcacatgtttcc

SEQ ID NO: 9800 - DNA, 20 bp, Homo Sapiens
aattgtagcacatgtttccc

SEQ ID NO: 9801 - DNA, 20 bp, Homo Sapiens
attgtagcacatgtttccct

SEQ ID NO: 9802 - DNA, 20 bp, Homo Sapiens
ttgtagcacatgtttccctg

SEQ ID NO: 9803 - DNA, 20 bp, Homo Sapiens
tgtagcacatgtttccctga

SEQ ID NO: 9804 - DNA, 20 bp, Homo Sapiens
gtagcacatgtttccctgac

SEQ ID NO: 9805 - DNA, 20 bp, Homo Sapiens
tagcacatgtttccctgaca

SEQ ID NO: 9806 - DNA, 20 bp, Homo Sapiens
agcacatgtttccctgacat

SEQ ID NO: 9807 - DNA, 20 bp, Homo Sapiens
gcacatgtttccctgacatt

SEQ ID NO: 9808 - DNA, 20 bp, Homo Sapiens
cacatgtttccctgacattt

SEQ ID NO: 9809 - DNA, 20 bp, Homo Sapiens
acatgtttccctgacatttt

SEQ ID NO: 9810 - DNA, 20 bp, Homo Sapiens
catgtttccctgacattttc

SEQ ID NO: 9811 - DNA, 20 bp, Homo Sapiens
atgtttccctgacattttca

SEQ ID NO: 9812 - DNA, 20 bp, Homo Sapiens
tgtttccctgacattttcaa

SEQ ID NO: 9813 - DNA, 20 bp, Homo Sapiens
gtttccctgacattttcaat

SEQ ID NO: 9814 - DNA, 20 bp, Homo Sapiens
tttccctgacattttcaata

SEQ ID NO: 9815 - DNA, 20 bp, Homo Sapiens
ttccctgacattttcaatag

SEQ ID NO: 9816 - DNA, 20 bp, Homo Sapiens
tccctgacattttcaataga

SEQ ID NO: 9817 - DNA, 20 bp, Homo Sapiens
ccctgacattttcaatagag

SEQ ID NO: 9818 - DNA, 20 bp, Homo Sapiens
cctgacattttcaatagagg

SEQ ID NO: 9819 - DNA, 20 bp, Homo Sapiens
ctgacattttcaatagagga

SEQ ID NO: 9820 - DNA, 20 bp, Homo Sapiens
tgacattttcaatagaggat

SEQ ID NO: 9821 - DNA, 20 bp, Homo Sapiens
gacattttcaatagaggata

SEQ ID NO: 9822 - DNA, 20 bp, Homo Sapiens
acattttcaatagaggatac

SEQ ID NO: 9823 - DNA, 20 bp, Homo Sapiens
cattttcaatagaggataca

SEQ ID NO: 9824 - DNA, 20 bp, Homo Sapiens
attttcaatagaggatacaa

SEQ ID NO: 9825 - DNA, 20 bp, Homo Sapiens
ttttcaatagaggatacaac

SEQ ID NO: 9826 - DNA, 20 bp, Homo Sapiens
tttcaatagaggatacaaca

SEQ ID NO: 9827 - DNA, 20 bp, Homo Sapiens
ttcaatagaggatacaacat

SEQ ID NO: 9828 - DNA, 20 bp, Homo Sapiens
tcaatagaggatacaacatc

SEQ ID NO: 9829 - DNA, 20 bp, Homo Sapiens
caatagaggatacaacatca

SEQ ID NO: 9830 - DNA, 20 bp, Homo Sapiens
aatagaggatacaacatcac

SEQ ID NO: 9831 - DNA, 20 bp, Homo Sapiens
atagaggatacaacatcaca

SEQ ID NO: 9832 - DNA, 20 bp, Homo Sapiens
tagaggatacaacatcacag

SEQ ID NO: 9833 - DNA, 20 bp, Homo Sapiens
agaggatacaacatcacaga

SEQ ID NO: 9834 - DNA, 20 bp, Homo Sapiens
gaggatacaacatcacagaa

SEQ ID NO: 9835 - DNA, 20 bp, Homo Sapiens
aggatacaacatcacagaat

SEQ ID NO: 9836 - DNA, 20 bp, Homo Sapiens
ggatacaacatcacagaatc

SEQ ID NO: 9837 - DNA, 20 bp, Homo Sapiens
gatacaacatcacagaatct

SEQ ID NO: 9838 - DNA, 20 bp, Homo Sapiens
atacaacatcacagaatctt

SEQ ID NO: 9839 - DNA, 20 bp, Homo Sapiens
tacaacatcacagaatcttt

SEQ ID NO: 9840 - DNA, 20 bp, Homo Sapiens
acaacatcacagaatctttc

SEQ ID NO: 9841 - DNA, 20 bp, Homo Sapiens
caacatcacagaatctttct

SEQ ID NO: 9842 - DNA, 20 bp, Homo Sapiens
aacatcacagaatctttctg

SEQ ID NO: 9843 - DNA, 20 bp, Homo Sapiens
acatcacagaatctttctgg

SEQ ID NO: 9844 - DNA, 20 bp, Homo Sapiens
catcacagaatctttctgga

SEQ ID NO: 9845 - DNA, 20 bp, Homo Sapiens
atcacagaatctttctggat

SEQ ID NO: 9846 - DNA, 20 bp, Homo Sapiens
tcacagaatctttctggatg

SEQ ID NO: 9847 - DNA, 20 bp, Homo Sapiens
cacagaatctttctggatga

SEQ ID NO: 9848 - DNA, 20 bp, Homo Sapiens
acagaatctttctggatgat

SEQ ID NO: 9849 - DNA, 20 bp, Homo Sapiens
cagaatctttctggatgatt

SEQ ID NO: 9850 - DNA, 20 bp, Homo Sapiens
agaatctttctggatgattc

SEQ ID NO: 9851 - DNA, 20 bp, Homo Sapiens
gaatctttctggatgattct

SEQ ID NO: 9852 - DNA, 20 bp, Homo Sapiens
aatctttctggatgattctg

SEQ ID NO: 9853 - DNA, 20 bp, Homo Sapiens
atctttctggatgattctgt

SEQ ID NO: 9854 - DNA, 20 bp, Homo Sapiens
tctttctggatgattctgtg

SEQ ID NO: 9855 - DNA, 20 bp, Homo Sapiens
ctttctggatgattctgtgt

SEQ ID NO: 9856 - DNA, 20 bp, Homo Sapiens
tttctggatgattctgtgtt

SEQ ID NO: 9857 - DNA, 20 bp, Homo Sapiens
ttctggatgattctgtgtta

SEQ ID NO: 9858 - DNA, 20 bp, Homo Sapiens
tctggatgattctgtgttat

SEQ ID NO: 9859 - DNA, 20 bp, Homo Sapiens
ctggatgattctgtgttatc

SEQ ID NO: 9860 - DNA, 20 bp, Homo Sapiens
tggatgattctgtgttatca

SEQ ID NO: 9861 - DNA, 20 bp, Homo Sapiens
ggatgattctgtgttatcaa

SEQ ID NO: 9862 - DNA, 20 bp, Homo Sapiens
gatgattctgtgttatcaag

SEQ ID NO: 9863 - DNA, 20 bp, Homo Sapiens
atgattctgtgttatcaagg

SEQ ID NO: 9864 - DNA, 20 bp, Homo Sapiens
tgattctgtgttatcaagga

SEQ ID NO: 9865 - DNA, 20 bp, Homo Sapiens
gattctgtgttatcaaggaa

SEQ ID NO: 9866 - DNA, 20 bp, Homo Sapiens
attctgtgttatcaaggaat

SEQ ID NO: 9867 - DNA, 20 bp, Homo Sapiens
ttctgtgttatcaaggaatt

SEQ ID NO: 9868 - DNA, 20 bp, Homo Sapiens
tctgtgttatcaaggaattg

SEQ ID NO: 9869 - DNA, 20 bp, Homo Sapiens
ctgtgttatcaaggaattgt

SEQ ID NO: 9870 - DNA, 20 bp, Homo Sapiens
tgtgttatcaaggaattgta

SEQ ID NO: 9871 - DNA, 20 bp, Homo Sapiens
gtgttatcaaggaattgtac

SEQ ID NO: 9872 - DNA, 20 bp, Homo Sapiens
tgttatcaaggaattgtact

SEQ ID NO: 9873 - DNA, 20 bp, Homo Sapiens
gttatcaaggaattgtactg

SEQ ID NO: 9874 - DNA, 20 bp, Homo Sapiens
ttatcaaggaattgtactgt

SEQ ID NO: 9875 - DNA, 20 bp, Homo Sapiens
tatcaaggaattgtactgtg

SEQ ID NO: 9876 - DNA, 20 bp, Homo Sapiens
atcaaggaattgtactgtgc

SEQ ID NO: 9877 - DNA, 20 bp, Homo Sapiens
tcaaggaattgtactgtgct

SEQ ID NO: 9878 - DNA, 20 bp, Homo Sapiens
caaggaattgtactgtgcta

SEQ ID NO: 9879 - DNA, 20 bp, Homo Sapiens
aaggaattgtactgtgctac

SEQ ID NO: 9880 - DNA, 20 bp, Homo Sapiens
aggaattgtactgtgctaca

SEQ ID NO: 9881 - DNA, 20 bp, Homo Sapiens
ggaattgtactgtgctacaa

SEQ ID NO: 9882 - DNA, 20 bp, Homo Sapiens
gaattgtactgtgctacaat

SEQ ID NO: 9883 - DNA, 20 bp, Homo Sapiens
aattgtactgtgctacaatt

SEQ ID NO: 9884 - DNA, 20 bp, Homo Sapiens
attgtactgtgctacaatta

SEQ ID NO: 9885 - DNA, 20 bp, Homo Sapiens
ttgtactgtgctacaattat

SEQ ID NO: 9886 - DNA, 20 bp, Homo Sapiens
tgtactgtgctacaattatc

SEQ ID NO: 9887 - DNA, 20 bp, Homo Sapiens
gtactgtgctacaattatct

SEQ ID NO: 9888 - DNA, 20 bp, Homo Sapiens
tactgtgctacaattatctc

SEQ ID NO: 9889 - DNA, 20 bp, Homo Sapiens
actgtgctacaattatctct

SEQ ID NO: 9890 - DNA, 20 bp, Homo Sapiens
ctgtgctacaattatctcta

SEQ ID NO: 9891 - DNA, 20 bp, Homo Sapiens
tgtgctacaattatctctag

SEQ ID NO: 9892 - DNA, 20 bp, Homo Sapiens
gtgctacaattatctctaga

SEQ ID NO: 9893 - DNA, 20 bp, Homo Sapiens
tgctacaattatctctagaa

SEQ ID NO: 9894 - DNA, 20 bp, Homo Sapiens
gctacaattatctctagaat

SEQ ID NO: 9895 - DNA, 20 bp, Homo Sapiens
ctacaattatctctagaatc

SEQ ID NO: 9896 - DNA, 20 bp, Homo Sapiens
tacaattatctctagaatct

SEQ ID NO: 9897 - DNA, 20 bp, Homo Sapiens
acaattatctctagaatctc

SEQ ID NO: 9898 - DNA, 20 bp, Homo Sapiens
caattatctctagaatctcc

SEQ ID NO: 9899 - DNA, 20 bp, Homo Sapiens
aattatctctagaatctcca

SEQ ID NO: 9900 - DNA, 20 bp, Homo Sapiens
attatctctagaatctccag

SEQ ID NO: 9901 - DNA, 20 bp, Homo Sapiens
ttatctctagaatctccaga

SEQ ID NO: 9902 - DNA, 20 bp, Homo Sapiens
tatctctagaatctccagaa

SEQ ID NO: 9903 - DNA, 20 bp, Homo Sapiens
atctctagaatctccagaaa

SEQ ID NO: 9904 - DNA, 20 bp, Homo Sapiens
tctctagaatctccagaaag

SEQ ID NO: 9905 - DNA, 20 bp, Homo Sapiens
ctctagaatctccagaaagg

SEQ ID NO: 9906 - DNA, 20 bp, Homo Sapiens
tctagaatctccagaaaggt

SEQ ID NO: 9907 - DNA, 20 bp, Homo Sapiens
ctagaatctccagaaaggtg

SEQ ID NO: 9908 - DNA, 20 bp, Homo Sapiens
tagaatctccagaaaggtgg

SEQ ID NO: 9909 - DNA, 20 bp, Homo Sapiens
agaatctccagaaaggtgga

SEQ ID NO: 9910 - DNA, 20 bp, Homo Sapiens
gaatctccagaaaggtggag

SEQ ID NO: 9911 - DNA, 20 bp, Homo Sapiens
aatctccagaaaggtggagg

SEQ ID NO: 9912 - DNA, 20 bp, Homo Sapiens
atctccagaaaggtggaggg

SEQ ID NO: 9913 - DNA, 20 bp, Homo Sapiens
tctccagaaaggtggagggc

SEQ ID NO: 9914 - DNA, 20 bp, Homo Sapiens
ctccagaaaggtggagggct

SEQ ID NO: 9915 - DNA, 20 bp, Homo Sapiens
tccagaaaggtggagggctg

SEQ ID NO: 9916 - DNA, 20 bp, Homo Sapiens
ccagaaaggtggagggctgt

SEQ ID NO: 9917 - DNA, 20 bp, Homo Sapiens
cagaaaggtggagggctgtt

SEQ ID NO: 9918 - DNA, 20 bp, Homo Sapiens
agaaaggtggagggctgttc

SEQ ID NO: 9919 - DNA, 20 bp, Homo Sapiens
gaaaggtggagggctgttcg

SEQ ID NO: 9920 - DNA, 20 bp, Homo Sapiens
aaaggtggagggctgttcgc

SEQ ID NO: 9921 - DNA, 20 bp, Homo Sapiens
aaggtggagggctgttcgcc

SEQ ID NO: 9922 - DNA, 20 bp, Homo Sapiens
aggtggagggctgttcgccc

SEQ ID NO: 9923 - DNA, 20 bp, Homo Sapiens
ggtggagggctgttcgccct

SEQ ID NO: 9924 - DNA, 20 bp, Homo Sapiens
gtggagggctgttcgccctt

SEQ ID NO: 9925 - DNA, 20 bp, Homo Sapiens
tggagggctgttcgccctta

SEQ ID NO: 9926 - DNA, 20 bp, Homo Sapiens
ggagggctgttcgcccttac

SEQ ID NO: 9927 - DNA, 20 bp, Homo Sapiens
gagggctgttcgcccttaca

SEQ ID NO: 9928 - DNA, 20 bp, Homo Sapiens
agggctgttcgcccttacac

SEQ ID NO: 9929 - DNA, 20 bp, Homo Sapiens
gggctgttcgcccttacact

SEQ ID NO: 9930 - DNA, 20 bp, Homo Sapiens
ggctgttcgcccttacacta

SEQ ID NO: 9931 - DNA, 20 bp, Homo Sapiens
gctgttcgcccttacactaa

SEQ ID NO: 9932 - DNA, 20 bp, Homo Sapiens
ctgttcgcccttacactaaa

SEQ ID NO: 9933 - DNA, 20 bp, Homo Sapiens
tgttcgcccttacactaaat

SEQ ID NO: 9934 - DNA, 20 bp, Homo Sapiens
gttcgcccttacactaaatg

SEQ ID NO: 9935 - DNA, 20 bp, Homo Sapiens
ttcgcccttacactaaatgg

SEQ ID NO: 9936 - DNA, 20 bp, Homo Sapiens
tcgcccttacactaaatggt

SEQ ID NO: 9937 - DNA, 20 bp, Homo Sapiens
cgcccttacactaaatggtc

SEQ ID NO: 9938 - DNA, 20 bp, Homo Sapiens
gcccttacactaaatggtct

SEQ ID NO: 9939 - DNA, 20 bp, Homo Sapiens
cccttacactaaatggtctc

SEQ ID NO: 9940 - DNA, 20 bp, Homo Sapiens
ccttacactaaatggtctca

SEQ ID NO: 9941 - DNA, 20 bp, Homo Sapiens
cttacactaaatggtctcag

SEQ ID NO: 9942 - DNA, 20 bp, Homo Sapiens
ttacactaaatggtctcagt

SEQ ID NO: 9943 - DNA, 20 bp, Homo Sapiens
tacactaaatggtctcagtt

SEQ ID NO: 9944 - DNA, 20 bp, Homo Sapiens
acactaaatggtctcagttg

SEQ ID NO: 9945 - DNA, 20 bp, Homo Sapiens
cactaaatggtctcagttgg

SEQ ID NO: 9946 - DNA, 20 bp, Homo Sapiens
actaaatggtctcagttgga

SEQ ID NO: 9947 - DNA, 20 bp, Homo Sapiens
ctaaatggtctcagttggat

SEQ ID NO: 9948 - DNA, 20 bp, Homo Sapiens
taaatggtctcagttggatt

SEQ ID NO: 9949 - DNA, 20 bp, Homo Sapiens
aaatggtctcagttggattt

SEQ ID NO: 9950 - DNA, 20 bp, Homo Sapiens
aatggtctcagttggatttt

SEQ ID NO: 9951 - DNA, 20 bp, Homo Sapiens
atggtctcagttggattttt

SEQ ID NO: 9952 - DNA, 20 bp, Homo Sapiens
tggtctcagttggatttttt

SEQ ID NO: 9953 - DNA, 20 bp, Homo Sapiens
ggtctcagttggattttttt

SEQ ID NO: 9954 - DNA, 20 bp, Homo Sapiens
gtctcagttggatttttttt

SEQ ID NO: 9955 - DNA, 20 bp, Homo Sapiens
tctcagttggattttttttt

SEQ ID NO: 9956 - DNA, 20 bp, Homo Sapiens
ctcagttggatttttttttc

SEQ ID NO: 9957 - DNA, 20 bp, Homo Sapiens
tcagttggatttttttttcc

SEQ ID NO: 9958 - DNA, 20 bp, Homo Sapiens
cagttggatttttttttcct

SEQ ID NO: 9959 - DNA, 20 bp, Homo Sapiens
agttggatttttttttcctg

SEQ ID NO: 9960 - DNA, 20 bp, Homo Sapiens
gttggatttttttttcctgt

SEQ ID NO: 9961 - DNA, 20 bp, Homo Sapiens
ttggatttttttttcctgtt

SEQ ID NO: 9962 - DNA, 20 bp, Homo Sapiens
tggatttttttttcctgttt

SEQ ID NO: 9963 - DNA, 20 bp, Homo Sapiens
ggatttttttttcctgtttt

SEQ ID NO: 9964 - DNA, 20 bp, Homo Sapiens
gatttttttttcctgttttc

SEQ ID NO: 9965 - DNA, 20 bp, Homo Sapiens
atttttttttcctgttttct

SEQ ID NO: 9966 - DNA, 20 bp, Homo Sapiens
tttttttttcctgttttcta

SEQ ID NO: 9967 - DNA, 20 bp, Homo Sapiens
ttttttttcctgttttctat

SEQ ID NO: 9968 - DNA, 20 bp, Homo Sapiens
tttttttcctgttttctatt

SEQ ID NO: 9969 - DNA, 20 bp, Homo Sapiens
ttttttcctgttttctattt

SEQ ID NO: 9970 - DNA, 20 bp, Homo Sapiens
tttttcctgttttctatttc

SEQ ID NO: 9971 - DNA, 20 bp, Homo Sapiens
ttttcctgttttctatttcc

SEQ ID NO: 9972 - DNA, 20 bp, Homo Sapiens
tttcctgttttctatttcct

SEQ ID NO: 9973 - DNA, 20 bp, Homo Sapiens
ttcctgttttctatttcctc

SEQ ID NO: 9974 - DNA, 20 bp, Homo Sapiens
tcctgttttctatttcctct

SEQ ID NO: 9975 - DNA, 20 bp, Homo Sapiens
cctgttttctatttcctctt

SEQ ID NO: 9976 - DNA, 20 bp, Homo Sapiens
ctgttttctatttcctctta

SEQ ID NO: 9977 - DNA, 20 bp, Homo Sapiens
tgttttctatttcctcttaa

SEQ ID NO: 9978 - DNA, 20 bp, Homo Sapiens
gttttctatttcctcttaag

SEQ ID NO: 9979 - DNA, 20 bp, Homo Sapiens
ttttctatttcctcttaagt

SEQ ID NO: 9980 - DNA, 20 bp, Homo Sapiens
tttctatttcctcttaagta

SEQ ID NO: 9981 - DNA, 20 bp, Homo Sapiens
ttctatttcctcttaagtac

SEQ ID NO: 9982 - DNA, 20 bp, Homo Sapiens
tctatttcctcttaagtaca

SEQ ID NO: 9983 - DNA, 20 bp, Homo Sapiens
ctatttcctcttaagtacac

SEQ ID NO: 9984 - DNA, 20 bp, Homo Sapiens
tatttcctcttaagtacacc

SEQ ID NO: 9985 - DNA, 20 bp, Homo Sapiens
atttcctcttaagtacacct

SEQ ID NO: 9986 - DNA, 20 bp, Homo Sapiens
tttcctcttaagtacacctt

SEQ ID NO: 9987 - DNA, 20 bp, Homo Sapiens
ttcctcttaagtacaccttc

SEQ ID NO: 9988 - DNA, 20 bp, Homo Sapiens
tcctcttaagtacaccttca

SEQ ID NO: 9989 - DNA, 20 bp, Homo Sapiens
cctcttaagtacaccttcaa

SEQ ID NO: 9990 - DNA, 20 bp, Homo Sapiens
ctcttaagtacaccttcaac

SEQ ID NO: 9991 - DNA, 20 bp, Homo Sapiens
tcttaagtacaccttcaact

SEQ ID NO: 9992 - DNA, 20 bp, Homo Sapiens
cttaagtacaccttcaacta

SEQ ID NO: 9993 - DNA, 20 bp, Homo Sapiens
ttaagtacaccttcaactat

SEQ ID NO: 9994 - DNA, 20 bp, Homo Sapiens
taagtacaccttcaactata

SEQ ID NO: 9995 - DNA, 20 bp, Homo Sapiens
aagtacaccttcaactatat

SEQ ID NO: 9996 - DNA, 20 bp, Homo Sapiens
agtacaccttcaactatatt

SEQ ID NO: 9997 - DNA, 20 bp, Homo Sapiens
gtacaccttcaactatattc

SEQ ID NO: 9998 - DNA, 20 bp, Homo Sapiens
tacaccttcaactatattcc

SEQ ID NO: 9999 - DNA, 20 bp, Homo Sapiens
acaccttcaactatattccc

SEQ ID NO: 10000 - DNA, 20 bp, Homo Sapiens
caccttcaactatattccca

SEQ ID NO: 10001 - DNA, 20 bp, Homo Sapiens
accttcaactatattcccat

SEQ ID NO: 10002 - DNA, 20 bp, Homo Sapiens
ccttcaactatattcccatc

SEQ ID NO: 10003 - DNA, 20 bp, Homo Sapiens
cttcaactatattcccatcc

SEQ ID NO: 10004 - DNA, 20 bp, Homo Sapiens
ttcaactatattcccatccc

SEQ ID NO: 10005 - DNA, 20 bp, Homo Sapiens
tcaactatattcccatccct

SEQ ID NO: 10006 - DNA, 20 bp, Homo Sapiens
caactatattcccatccctc

SEQ ID NO: 10007 - DNA, 20 bp, Homo Sapiens
aactatattcccatccctct

SEQ ID NO: 10008 - DNA, 20 bp, Homo Sapiens
actatattcccatccctcta

SEQ ID NO: 10009 - DNA, 20 bp, Homo Sapiens
ctatattcccatccctctat

SEQ ID NO: 10010 - DNA, 20 bp, Homo Sapiens
tatattcccatccctctatt

SEQ ID NO: 10011 - DNA, 20 bp, Homo Sapiens
atattcccatccctctattt

SEQ ID NO: 10012 - DNA, 20 bp, Homo Sapiens
tattcccatccctctatttt

SEQ ID NO: 10013 - DNA, 20 bp, Homo Sapiens
attcccatccctctatttta

SEQ ID NO: 10014 - DNA, 20 bp, Homo Sapiens
ttcccatccctctattttaa

SEQ ID NO: 10015 - DNA, 20 bp, Homo Sapiens
tcccatccctctattttaat

SEQ ID NO: 10016 - DNA, 20 bp, Homo Sapiens
cccatccctctattttaatc

SEQ ID NO: 10017 - DNA, 20 bp, Homo Sapiens
ccatccctctattttaatct

SEQ ID NO: 10018 - DNA, 20 bp, Homo Sapiens
catccctctattttaatctg

SEQ ID NO: 10019 - DNA, 20 bp, Homo Sapiens
atccctctattttaatctgt

SEQ ID NO: 10020 - DNA, 20 bp, Homo Sapiens
tccctctattttaatctgtt

SEQ ID NO: 10021 - DNA, 20 bp, Homo Sapiens
ccctctattttaatctgtta

SEQ ID NO: 10022 - DNA, 20 bp, Homo Sapiens
cctctattttaatctgttat

SEQ ID NO: 10023 - DNA, 20 bp, Homo Sapiens
ctctattttaatctgttatg

SEQ ID NO: 10024 - DNA, 20 bp, Homo Sapiens
tctattttaatctgttatga

SEQ ID NO: 10025 - DNA, 20 bp, Homo Sapiens
ctattttaatctgttatgaa

SEQ ID NO: 10026 - DNA, 20 bp, Homo Sapiens
tattttaatctgttatgaag

SEQ ID NO: 10027 - DNA, 20 bp, Homo Sapiens
attttaatctgttatgaagg

SEQ ID NO: 10028 - DNA, 20 bp, Homo Sapiens
ttttaatctgttatgaagga

SEQ ID NO: 10029 - DNA, 20 bp, Homo Sapiens
tttaatctgttatgaaggaa

SEQ ID NO: 10030 - DNA, 20 bp, Homo Sapiens
ttaatctgttatgaaggaag

SEQ ID NO: 10031 - DNA, 20 bp, Homo Sapiens
taatctgttatgaaggaagg

SEQ ID NO: 10032 - DNA, 20 bp, Homo Sapiens
aatctgttatgaaggaaggt

SEQ ID NO: 10033 - DNA, 20 bp, Homo Sapiens
atctgttatgaaggaaggta

SEQ ID NO: 10034 - DNA, 20 bp, Homo Sapiens
tctgttatgaaggaaggtaa

SEQ ID NO: 10035 - DNA, 20 bp, Homo Sapiens
ctgttatgaaggaaggtaaa

SEQ ID NO: 10036 - DNA, 20 bp, Homo Sapiens
tgttatgaaggaaggtaaat

SEQ ID NO: 10037 - DNA, 20 bp, Homo Sapiens
gttatgaaggaaggtaaata

SEQ ID NO: 10038 - DNA, 20 bp, Homo Sapiens
ttatgaaggaaggtaaataa

SEQ ID NO: 10039 - DNA, 20 bp, Homo Sapiens
tatgaaggaaggtaaataaa

SEQ ID NO: 10040 - DNA, 20 bp, Homo Sapiens
atgaaggaaggtaaataaaa

SEQ ID NO: 10041 - DNA, 20 bp, Homo Sapiens
tgaaggaaggtaaataaaaa

SEQ ID NO: 10042 - DNA, 20 bp, Homo Sapiens
gaaggaaggtaaataaaaat

SEQ ID NO: 10043 - DNA, 20 bp, Homo Sapiens
aaggaaggtaaataaaaatg

SEQ ID NO: 10044 - DNA, 20 bp, Homo Sapiens
aggaaggtaaataaaaatgc

SEQ ID NO: 10045 - DNA, 20 bp, Homo Sapiens
ggaaggtaaataaaaatgct

SEQ ID NO: 10046 - DNA, 20 bp, Homo Sapiens
gaaggtaaataaaaatgcta

SEQ ID NO: 10047 - DNA, 20 bp, Homo Sapiens
aaggtaaataaaaatgctaa

SEQ ID NO: 10048 - DNA, 20 bp, Homo Sapiens
aggtaaataaaaatgctaaa

SEQ ID NO: 10049 - DNA, 20 bp, Homo Sapiens
ggtaaataaaaatgctaaat

SEQ ID NO: 10050 - DNA, 20 bp, Homo Sapiens
gtaaataaaaatgctaaata

SEQ ID NO: 10051 - DNA, 20 bp, Homo Sapiens
taaataaaaatgctaaatag

SEQ ID NO: 10052 - DNA, 20 bp, Homo Sapiens
aaataaaaatgctaaataga

SEQ ID NO: 10053 - DNA, 20 bp, Homo Sapiens
aataaaaatgctaaatagaa

SEQ ID NO: 10054 - DNA, 20 bp, Homo Sapiens
ataaaaatgctaaatagaag

SEQ ID NO: 10055 - DNA, 20 bp, Homo Sapiens
taaaaatgctaaatagaaga

SEQ ID NO: 10056 - DNA, 20 bp, Homo Sapiens
aaaaatgctaaatagaagaa

SEQ ID NO: 10057 - DNA, 20 bp, Homo Sapiens
aaaatgctaaatagaagaaa

SEQ ID NO: 10058 - DNA, 20 bp, Homo Sapiens
aaatgctaaatagaagaaat

SEQ ID NO: 10059 - DNA, 20 bp, Homo Sapiens
aatgctaaatagaagaaatt

SEQ ID NO: 10060 - DNA, 20 bp, Homo Sapiens
atgctaaatagaagaaattg

SEQ ID NO: 10061 - DNA, 20 bp, Homo Sapiens
tgctaaatagaagaaattgt

SEQ ID NO: 10062 - DNA, 20 bp, Homo Sapiens
gctaaatagaagaaattgta

SEQ ID NO: 10063 - DNA, 20 bp, Homo Sapiens
ctaaatagaagaaattgtag

SEQ ID NO: 10064 - DNA, 20 bp, Homo Sapiens
taaatagaagaaattgtagg

SEQ ID NO: 10065 - DNA, 20 bp, Homo Sapiens
aaatagaagaaattgtaggt

SEQ ID NO: 10066 - DNA, 20 bp, Homo Sapiens
aatagaagaaattgtaggta

SEQ ID NO: 10067 - DNA, 20 bp, Homo Sapiens
atagaagaaattgtaggtaa

SEQ ID NO: 10068 - DNA, 20 bp, Homo Sapiens
tagaagaaattgtaggtaag

SEQ ID NO: 10069 - DNA, 20 bp, Homo Sapiens
agaagaaattgtaggtaagg

SEQ ID NO: 10070 - DNA, 20 bp, Homo Sapiens
gaagaaattgtaggtaaggt

SEQ ID NO: 10071 - DNA, 20 bp, Homo Sapiens
aagaaattgtaggtaaggta

SEQ ID NO: 10072 - DNA, 20 bp, Homo Sapiens
agaaattgtaggtaaggtaa

SEQ ID NO: 10073 - DNA, 20 bp, Homo Sapiens
gaaattgtaggtaaggtaag

SEQ ID NO: 10074 - DNA, 20 bp, Homo Sapiens
aaattgtaggtaaggtaaga

SEQ ID NO: 10075 - DNA, 20 bp, Homo Sapiens
aattgtaggtaaggtaagag

SEQ ID NO: 10076 - DNA, 20 bp, Homo Sapiens
attgtaggtaaggtaagagg

SEQ ID NO: 10077 - DNA, 20 bp, Homo Sapiens
ttgtaggtaaggtaagagga

SEQ ID NO: 10078 - DNA, 20 bp, Homo Sapiens
tgtaggtaaggtaagaggaa

SEQ ID NO: 10079 - DNA, 20 bp, Homo Sapiens
gtaggtaaggtaagaggaat

SEQ ID NO: 10080 - DNA, 20 bp, Homo Sapiens
taggtaaggtaagaggaatc

SEQ ID NO: 10081 - DNA, 20 bp, Homo Sapiens
aggtaaggtaagaggaatca

SEQ ID NO: 10082 - DNA, 20 bp, Homo Sapiens
ggtaaggtaagaggaatcaa

SEQ ID NO: 10083 - DNA, 20 bp, Homo Sapiens
gtaaggtaagaggaatcaag

SEQ ID NO: 10084 - DNA, 20 bp, Homo Sapiens
taaggtaagaggaatcaagt

SEQ ID NO: 10085 - DNA, 20 bp, Homo Sapiens
aaggtaagaggaatcaagtt

SEQ ID NO: 10086 - DNA, 20 bp, Homo Sapiens
aggtaagaggaatcaagttc

SEQ ID NO: 10087 - DNA, 20 bp, Homo Sapiens
ggtaagaggaatcaagttct

SEQ ID NO: 10088 - DNA, 20 bp, Homo Sapiens
gtaagaggaatcaagttctg

SEQ ID NO: 10089 - DNA, 20 bp, Homo Sapiens
taagaggaatcaagttctga

SEQ ID NO: 10090 - DNA, 20 bp, Homo Sapiens
aagaggaatcaagttctgag

SEQ ID NO: 10091 - DNA, 20 bp, Homo Sapiens
agaggaatcaagttctgagt

SEQ ID NO: 10092 - DNA, 20 bp, Homo Sapiens
gaggaatcaagttctgagtg

SEQ ID NO: 10093 - DNA, 20 bp, Homo Sapiens
aggaatcaagttctgagtgg

SEQ ID NO: 10094 - DNA, 20 bp, Homo Sapiens
ggaatcaagttctgagtggc

SEQ ID NO: 10095 - DNA, 20 bp, Homo Sapiens
gaatcaagttctgagtggct

SEQ ID NO: 10096 - DNA, 20 bp, Homo Sapiens
aatcaagttctgagtggctg

SEQ ID NO: 10097 - DNA, 20 bp, Homo Sapiens
atcaagttctgagtggctgc

SEQ ID NO: 10098 - DNA, 20 bp, Homo Sapiens
tcaagttctgagtggctgcc

SEQ ID NO: 10099 - DNA, 20 bp, Homo Sapiens
caagttctgagtggctgcca

SEQ ID NO: 10100 - DNA, 20 bp, Homo Sapiens
aagttctgagtggctgccaa

SEQ ID NO: 10101 - DNA, 20 bp, Homo Sapiens
agttctgagtggctgccaag

SEQ ID NO: 10102 - DNA, 20 bp, Homo Sapiens
gttctgagtggctgccaagg

SEQ ID NO: 10103 - DNA, 20 bp, Homo Sapiens
ttctgagtggctgccaaggc

SEQ ID NO: 10104 - DNA, 20 bp, Homo Sapiens
tctgagtggctgccaaggca

SEQ ID NO: 10105 - DNA, 20 bp, Homo Sapiens
ctgagtggctgccaaggcac

SEQ ID NO: 10106 - DNA, 20 bp, Homo Sapiens
tgagtggctgccaaggcact

SEQ ID NO: 10107 - DNA, 20 bp, Homo Sapiens
gagtggctgccaaggcactc

SEQ ID NO: 10108 - DNA, 20 bp, Homo Sapiens
agtggctgccaaggcactca

SEQ ID NO: 10109 - DNA, 20 bp, Homo Sapiens
gtggctgccaaggcactcac

SEQ ID NO: 10110 - DNA, 20 bp, Homo Sapiens
tggctgccaaggcactcaca

SEQ ID NO: 10111 - DNA, 20 bp, Homo Sapiens
ggctgccaaggcactcacag

SEQ ID NO: 10112 - DNA, 20 bp, Homo Sapiens
gctgccaaggcactcacaga

SEQ ID NO: 10113 - DNA, 20 bp, Homo Sapiens
ctgccaaggcactcacagaa

SEQ ID NO: 10114 - DNA, 20 bp, Homo Sapiens
tgccaaggcactcacagaat

SEQ ID NO: 10115 - DNA, 20 bp, Homo Sapiens
gccaaggcactcacagaatc

SEQ ID NO: 10116 - DNA, 20 bp, Homo Sapiens
ccaaggcactcacagaatca

SEQ ID NO: 10117 - DNA, 20 bp, Homo Sapiens
caaggcactcacagaatcat

SEQ ID NO: 10118 - DNA, 20 bp, Homo Sapiens
aaggcactcacagaatcata

SEQ ID NO: 10119 - DNA, 20 bp, Homo Sapiens
aggcactcacagaatcataa

SEQ ID NO: 10120 - DNA, 20 bp, Homo Sapiens
ggcactcacagaatcataat

SEQ ID NO: 10121 - DNA, 20 bp, Homo Sapiens
gcactcacagaatcataatc

SEQ ID NO: 10122 - DNA, 20 bp, Homo Sapiens
cactcacagaatcataatca

SEQ ID NO: 10123 - DNA, 20 bp, Homo Sapiens
actcacagaatcataatcat

SEQ ID NO: 10124 - DNA, 20 bp, Homo Sapiens
ctcacagaatcataatcatg

SEQ ID NO: 10125 - DNA, 20 bp, Homo Sapiens
tcacagaatcataatcatgg

SEQ ID NO: 10126 - DNA, 20 bp, Homo Sapiens
cacagaatcataatcatggc

SEQ ID NO: 10127 - DNA, 20 bp, Homo Sapiens
acagaatcataatcatggct

SEQ ID NO: 10128 - DNA, 20 bp, Homo Sapiens
cagaatcataatcatggcta

SEQ ID NO: 10129 - DNA, 20 bp, Homo Sapiens
agaatcataatcatggctaa

SEQ ID NO: 10130 - DNA, 20 bp, Homo Sapiens
gaatcataatcatggctaaa

SEQ ID NO: 10131 - DNA, 20 bp, Homo Sapiens
aatcataatcatggctaaat

SEQ ID NO: 10132 - DNA, 20 bp, Homo Sapiens
atcataatcatggctaaata

SEQ ID NO: 10133 - DNA, 20 bp, Homo Sapiens
tcataatcatggctaaatat

SEQ ID NO: 10134 - DNA, 20 bp, Homo Sapiens
cataatcatggctaaatatt

SEQ ID NO: 10135 - DNA, 20 bp, Homo Sapiens
ataatcatggctaaatattt

SEQ ID NO: 10136 - DNA, 20 bp, Homo Sapiens
taatcatggctaaatattta

SEQ ID NO: 10137 - DNA, 20 bp, Homo Sapiens
aatcatggctaaatatttat

SEQ ID NO: 10138 - DNA, 20 bp, Homo Sapiens
atcatggctaaatatttatg

SEQ ID NO: 10139 - DNA, 20 bp, Homo Sapiens
tcatggctaaatatttatgg

SEQ ID NO: 10140 - DNA, 20 bp, Homo Sapiens
catggctaaatatttatgga

SEQ ID NO: 10141 - DNA, 20 bp, Homo Sapiens
atggctaaatatttatggag

SEQ ID NO: 10142 - DNA, 20 bp, Homo Sapiens
tggctaaatatttatggagg

SEQ ID NO: 10143 - DNA, 20 bp, Homo Sapiens
ggctaaatatttatggaggg

SEQ ID NO: 10144 - DNA, 20 bp, Homo Sapiens
gctaaatatttatggagggc

SEQ ID NO: 10145 - DNA, 20 bp, Homo Sapiens
ctaaatatttatggagggcc

SEQ ID NO: 10146 - DNA, 20 bp, Homo Sapiens
taaatatttatggagggcct

SEQ ID NO: 10147 - DNA, 20 bp, Homo Sapiens
aaatatttatggagggccta

SEQ ID NO: 10148 - DNA, 20 bp, Homo Sapiens
aatatttatggagggcctac

SEQ ID NO: 10149 - DNA, 20 bp, Homo Sapiens
atatttatggagggcctact

SEQ ID NO: 10150 - DNA, 20 bp, Homo Sapiens
tatttatggagggcctactg

SEQ ID NO: 10151 - DNA, 20 bp, Homo Sapiens
atttatggagggcctactgt

SEQ ID NO: 10152 - DNA, 20 bp, Homo Sapiens
tttatggagggcctactgtg

SEQ ID NO: 10153 - DNA, 20 bp, Homo Sapiens
ttatggagggcctactgtgg

SEQ ID NO: 10154 - DNA, 20 bp, Homo Sapiens
tatggagggcctactgtgga

SEQ ID NO: 10155 - DNA, 20 bp, Homo Sapiens
atggagggcctactgtggac

SEQ ID NO: 10156 - DNA, 20 bp, Homo Sapiens
tggagggcctactgtggacc

SEQ ID NO: 10157 - DNA, 20 bp, Homo Sapiens
ggagggcctactgtggacca

SEQ ID NO: 10158 - DNA, 20 bp, Homo Sapiens
gagggcctactgtggaccag

SEQ ID NO: 10159 - DNA, 20 bp, Homo Sapiens
agggcctactgtggaccagg

SEQ ID NO: 10160 - DNA, 20 bp, Homo Sapiens
gggcctactgtggaccaggc

SEQ ID NO: 10161 - DNA, 20 bp, Homo Sapiens
ggcctactgtggaccaggca

SEQ ID NO: 10162 - DNA, 20 bp, Homo Sapiens
gcctactgtggaccaggcac

SEQ ID NO: 10163 - DNA, 20 bp, Homo Sapiens
cctactgtggaccaggcact

SEQ ID NO: 10164 - DNA, 20 bp, Homo Sapiens
ctactgtggaccaggcactg

SEQ ID NO: 10165 - DNA, 20 bp, Homo Sapiens
tactgtggaccaggcactgg

SEQ ID NO: 10166 - DNA, 20 bp, Homo Sapiens
actgtggaccaggcactggg

SEQ ID NO: 10167 - DNA, 20 bp, Homo Sapiens
ctgtggaccaggcactgggc

SEQ ID NO: 10168 - DNA, 20 bp, Homo Sapiens
tgtggaccaggcactgggct

SEQ ID NO: 10169 - DNA, 20 bp, Homo Sapiens
gtggaccaggcactgggcta

SEQ ID NO: 10170 - DNA, 20 bp, Homo Sapiens
tggaccaggcactgggctaa

SEQ ID NO: 10171 - DNA, 20 bp, Homo Sapiens
ggaccaggcactgggctaaa

SEQ ID NO: 10172 - DNA, 20 bp, Homo Sapiens
gaccaggcactgggctaaat

SEQ ID NO: 10173 - DNA, 20 bp, Homo Sapiens
accaggcactgggctaaata

SEQ ID NO: 10174 - DNA, 20 bp, Homo Sapiens
ccaggcactgggctaaatac

SEQ ID NO: 10175 - DNA, 20 bp, Homo Sapiens
caggcactgggctaaatact

SEQ ID NO: 10176 - DNA, 20 bp, Homo Sapiens
aggcactgggctaaatactt

SEQ ID NO: 10177 - DNA, 20 bp, Homo Sapiens
ggcactgggctaaatactta

SEQ ID NO: 10178 - DNA, 20 bp, Homo Sapiens
gcactgggctaaatacttac

SEQ ID NO: 10179 - DNA, 20 bp, Homo Sapiens
cactgggctaaatacttaca

SEQ ID NO: 10180 - DNA, 20 bp, Homo Sapiens
actgggctaaatacttacat

SEQ ID NO: 10181 - DNA, 20 bp, Homo Sapiens
ctgggctaaatacttacatt

SEQ ID NO: 10182 - DNA, 20 bp, Homo Sapiens
tgggctaaatacttacattt

SEQ ID NO: 10183 - DNA, 20 bp, Homo Sapiens
gggctaaatacttacattta

SEQ ID NO: 10184 - DNA, 20 bp, Homo Sapiens
ggctaaatacttacatttac

SEQ ID NO: 10185 - DNA, 20 bp, Homo Sapiens
gctaaatacttacatttaca

SEQ ID NO: 10186 - DNA, 20 bp, Homo Sapiens
ctaaatacttacatttacaa

SEQ ID NO: 10187 - DNA, 20 bp, Homo Sapiens
taaatacttacatttacaag

SEQ ID NO: 10188 - DNA, 20 bp, Homo Sapiens
aaatacttacatttacaaga

SEQ ID NO: 10189 - DNA, 20 bp, Homo Sapiens
aatacttacatttacaagaa

SEQ ID NO: 10190 - DNA, 20 bp, Homo Sapiens
atacttacatttacaagaat

SEQ ID NO: 10191 - DNA, 20 bp, Homo Sapiens
tacttacatttacaagaatc

SEQ ID NO: 10192 - DNA, 20 bp, Homo Sapiens
acttacatttacaagaatca

SEQ ID NO: 10193 - DNA, 20 bp, Homo Sapiens
cttacatttacaagaatcat

SEQ ID NO: 10194 - DNA, 20 bp, Homo Sapiens
ttacatttacaagaatcatt

SEQ ID NO: 10195 - DNA, 20 bp, Homo Sapiens
tacatttacaagaatcattc

SEQ ID NO: 10196 - DNA, 20 bp, Homo Sapiens
acatttacaagaatcattct

SEQ ID NO: 10197 - DNA, 20 bp, Homo Sapiens
catttacaagaatcattctg

SEQ ID NO: 10198 - DNA, 20 bp, Homo Sapiens
atttacaagaatcattctga

SEQ ID NO: 10199 - DNA, 20 bp, Homo Sapiens
tttacaagaatcattctgag

SEQ ID NO: 10200 - DNA, 20 bp, Homo Sapiens
ttacaagaatcattctgaga

SEQ ID NO: 10201 - DNA, 20 bp, Homo Sapiens
tacaagaatcattctgagac

SEQ ID NO: 10202 - DNA, 20 bp, Homo Sapiens
acaagaatcattctgagaca

SEQ ID NO: 10203 - DNA, 20 bp, Homo Sapiens
caagaatcattctgagacag

SEQ ID NO: 10204 - DNA, 20 bp, Homo Sapiens
aagaatcattctgagacaga

SEQ ID NO: 10205 - DNA, 20 bp, Homo Sapiens
agaatcattctgagacagat

SEQ ID NO: 10206 - DNA, 20 bp, Homo Sapiens
gaatcattctgagacagata

SEQ ID NO: 10207 - DNA, 20 bp, Homo Sapiens
aatcattctgagacagatat

SEQ ID NO: 10208 - DNA, 20 bp, Homo Sapiens
atcattctgagacagatatt

SEQ ID NO: 10209 - DNA, 20 bp, Homo Sapiens
tcattctgagacagatattc

SEQ ID NO: 10210 - DNA, 20 bp, Homo Sapiens
cattctgagacagatattca

SEQ ID NO: 10211 - DNA, 20 bp, Homo Sapiens
attctgagacagatattcaa

SEQ ID NO: 10212 - DNA, 20 bp, Homo Sapiens
ttctgagacagatattcaat

SEQ ID NO: 10213 - DNA, 20 bp, Homo Sapiens
tctgagacagatattcaatg

SEQ ID NO: 10214 - DNA, 20 bp, Homo Sapiens
ctgagacagatattcaatga

SEQ ID NO: 10215 - DNA, 20 bp, Homo Sapiens
tgagacagatattcaatgat

SEQ ID NO: 10216 - DNA, 20 bp, Homo Sapiens
gagacagatattcaatgata

SEQ ID NO: 10217 - DNA, 20 bp, Homo Sapiens
agacagatattcaatgatat

SEQ ID NO: 10218 - DNA, 20 bp, Homo Sapiens
gacagatattcaatgatatc

SEQ ID NO: 10219 - DNA, 20 bp, Homo Sapiens
acagatattcaatgatatct

SEQ ID NO: 10220 - DNA, 20 bp, Homo Sapiens
cagatattcaatgatatctg

SEQ ID NO: 10221 - DNA, 20 bp, Homo Sapiens
agatattcaatgatatctgg

SEQ ID NO: 10222 - DNA, 20 bp, Homo Sapiens
gatattcaatgatatctggc

SEQ ID NO: 10223 - DNA, 20 bp, Homo Sapiens
atattcaatgatatctggct

SEQ ID NO: 10224 - DNA, 20 bp, Homo Sapiens
tattcaatgatatctggctt

SEQ ID NO: 10225 - DNA, 20 bp, Homo Sapiens
attcaatgatatctggcttc

SEQ ID NO: 10226 - DNA, 20 bp, Homo Sapiens
ttcaatgatatctggcttca

SEQ ID NO: 10227 - DNA, 20 bp, Homo Sapiens
tcaatgatatctggcttcac

SEQ ID NO: 10228 - DNA, 20 bp, Homo Sapiens
caatgatatctggcttcact

SEQ ID NO: 10229 - DNA, 20 bp, Homo Sapiens
aatgatatctggcttcacta

SEQ ID NO: 10230 - DNA, 20 bp, Homo Sapiens
atgatatctggcttcactac

SEQ ID NO: 10231 - DNA, 20 bp, Homo Sapiens
tgatatctggcttcactact

SEQ ID NO: 10232 - DNA, 20 bp, Homo Sapiens
gatatctggcttcactactc

SEQ ID NO: 10233 - DNA, 20 bp, Homo Sapiens
atatctggcttcactactca

SEQ ID NO: 10234 - DNA, 20 bp, Homo Sapiens
tatctggcttcactactcag

SEQ ID NO: 10235 - DNA, 20 bp, Homo Sapiens
atctggcttcactactcaga

SEQ ID NO: 10236 - DNA, 20 bp, Homo Sapiens
tctggcttcactactcagaa

SEQ ID NO: 10237 - DNA, 20 bp, Homo Sapiens
ctggcttcactactcagaag

SEQ ID NO: 10238 - DNA, 20 bp, Homo Sapiens
tggcttcactactcagaaga

SEQ ID NO: 10239 - DNA, 20 bp, Homo Sapiens
ggcttcactactcagaagat

SEQ ID NO: 10240 - DNA, 20 bp, Homo Sapiens
gcttcactactcagaagatt

SEQ ID NO: 10241 - DNA, 20 bp, Homo Sapiens
cttcactactcagaagattg

SEQ ID NO: 10242 - DNA, 20 bp, Homo Sapiens
ttcactactcagaagattgt

SEQ ID NO: 10243 - DNA, 20 bp, Homo Sapiens
tcactactcagaagattgtg

SEQ ID NO: 10244 - DNA, 20 bp, Homo Sapiens
cactactcagaagattgtgt

SEQ ID NO: 10245 - DNA, 20 bp, Homo Sapiens
actactcagaagattgtgtg

SEQ ID NO: 10246 - DNA, 20 bp, Homo Sapiens
ctactcagaagattgtgtgt

SEQ ID NO: 10247 - DNA, 20 bp, Homo Sapiens
tactcagaagattgtgtgtg

SEQ ID NO: 10248 - DNA, 20 bp, Homo Sapiens
actcagaagattgtgtgtgt

SEQ ID NO: 10249 - DNA, 20 bp, Homo Sapiens
ctcagaagattgtgtgtgtg

SEQ ID NO: 10250 - DNA, 20 bp, Homo Sapiens
tcagaagattgtgtgtgtgt

SEQ ID NO: 10251 - DNA, 20 bp, Homo Sapiens
cagaagattgtgtgtgtgtt

SEQ ID NO: 10252 - DNA, 20 bp, Homo Sapiens
agaagattgtgtgtgtgttt

SEQ ID NO: 10253 - DNA, 20 bp, Homo Sapiens
gaagattgtgtgtgtgtttg

SEQ ID NO: 10254 - DNA, 20 bp, Homo Sapiens
aagattgtgtgtgtgtttgt

SEQ ID NO: 10255 - DNA, 20 bp, Homo Sapiens
agattgtgtgtgtgtttgtg

SEQ ID NO: 10256 - DNA, 20 bp, Homo Sapiens
gattgtgtgtgtgtttgtgt

SEQ ID NO: 10257 - DNA, 20 bp, Homo Sapiens
attgtgtgtgtgtttgtgtg

SEQ ID NO: 10258 - DNA, 20 bp, Homo Sapiens
ttgtgtgtgtgtttgtgtgt

SEQ ID NO: 10259 - DNA, 20 bp, Homo Sapiens
tgtgtgtgtgtttgtgtgtg

SEQ ID NO: 10260 - DNA, 20 bp, Homo Sapiens
gtgtgtgtgtttgtgtgtgt

SEQ ID NO: 10261 - DNA, 20 bp, Homo Sapiens
tgtgtgtgtttgtgtgtgtg

SEQ ID NO: 10262 - DNA, 20 bp, Homo Sapiens
gtgtgtgtttgtgtgtgtgt

SEQ ID NO: 10263 - DNA, 20 bp, Homo Sapiens
tgtgtgtttgtgtgtgtgtg

SEQ ID NO: 10264 - DNA, 20 bp, Homo Sapiens
gtgtgtttgtgtgtgtgtgt

SEQ ID NO: 10265 - DNA, 20 bp, Homo Sapiens
tgtgtttgtgtgtgtgtgtg

SEQ ID NO: 10266 - DNA, 20 bp, Homo Sapiens
gtgtttgtgtgtgtgtgtgt

SEQ ID NO: 10267 - DNA, 20 bp, Homo Sapiens
tgtttgtgtgtgtgtgtgtg

SEQ ID NO: 10268 - DNA, 20 bp, Homo Sapiens
gtttgtgtgtgtgtgtgtgt

SEQ ID NO: 10269 - DNA, 20 bp, Homo Sapiens
tttgtgtgtgtgtgtgtgtg

SEQ ID NO: 10270 - DNA, 20 bp, Homo Sapiens
ttgtgtgtgtgtgtgtgtgt

SEQ ID NO: 10271 - DNA, 20 bp, Homo Sapiens
tgtgtgtgtgtgtgtgtgtg

SEQ ID NO: 10272 - DNA, 20 bp, Homo Sapiens
gtgtgtgtgtgtgtgtgtgt

SEQ ID NO: 10273 - DNA, 20 bp, Homo Sapiens
tgtgtgtgtgtgtgtgtgta

SEQ ID NO: 10274 - DNA, 20 bp, Homo Sapiens
gtgtgtgtgtgtgtgtgtat

SEQ ID NO: 10275 - DNA, 20 bp, Homo Sapiens
tgtgtgtgtgtgtgtgtatt

SEQ ID NO: 10276 - DNA, 20 bp, Homo Sapiens
gtgtgtgtgtgtgtgtattt

SEQ ID NO: 10277 - DNA, 20 bp, Homo Sapiens
tgtgtgtgtgtgtgtatttc

SEQ ID NO: 10278 - DNA, 20 bp, Homo Sapiens
gtgtgtgtgtgtgtatttca

SEQ ID NO: 10279 - DNA, 20 bp, Homo Sapiens
tgtgtgtgtgtgtatttcac

SEQ ID NO: 10280 - DNA, 20 bp, Homo Sapiens
gtgtgtgtgtgtatttcact

SEQ ID NO: 10281 - DNA, 20 bp, Homo Sapiens
tgtgtgtgtgtatttcactt

SEQ ID NO: 10282 - DNA, 20 bp, Homo Sapiens
gtgtgtgtgtatttcacttt

SEQ ID NO: 10283 - DNA, 20 bp, Homo Sapiens
tgtgtgtgtatttcactttt

SEQ ID NO: 10284 - DNA, 20 bp, Homo Sapiens
gtgtgtgtatttcacttttt

SEQ ID NO: 10285 - DNA, 20 bp, Homo Sapiens
tgtgtgtatttcactttttg

SEQ ID NO: 10286 - DNA, 20 bp, Homo Sapiens
gtgtgtatttcactttttgt

SEQ ID NO: 10287 - DNA, 20 bp, Homo Sapiens
tgtgtatttcactttttgtt

SEQ ID NO: 10288 - DNA, 20 bp, Homo Sapiens
gtgtatttcactttttgtta

SEQ ID NO: 10289 - DNA, 20 bp, Homo Sapiens
tgtatttcactttttgttat

SEQ ID NO: 10290 - DNA, 20 bp, Homo Sapiens
gtatttcactttttgttatt

SEQ ID NO: 10291 - DNA, 20 bp, Homo Sapiens
tatttcactttttgttattg

SEQ ID NO: 10292 - DNA, 20 bp, Homo Sapiens
atttcactttttgttattga

SEQ ID NO: 10293 - DNA, 20 bp, Homo Sapiens
tttcactttttgttattgac

SEQ ID NO: 10294 - DNA, 20 bp, Homo Sapiens
ttcactttttgttattgacc

SEQ ID NO: 10295 - DNA, 20 bp, Homo Sapiens
tcactttttgttattgacca

SEQ ID NO: 10296 - DNA, 20 bp, Homo Sapiens
cactttttgttattgaccat

SEQ ID NO: 10297 - DNA, 20 bp, Homo Sapiens
actttttgttattgaccatg

SEQ ID NO: 10298 - DNA, 20 bp, Homo Sapiens
ctttttgttattgaccatgt

SEQ ID NO: 10299 - DNA, 20 bp, Homo Sapiens
tttttgttattgaccatgtt

SEQ ID NO: 10300 - DNA, 20 bp, Homo Sapiens
ttttgttattgaccatgttc

SEQ ID NO: 10301 - DNA, 20 bp, Homo Sapiens
tttgttattgaccatgttct

SEQ ID NO: 10302 - DNA, 20 bp, Homo Sapiens
ttgttattgaccatgttctg

SEQ ID NO: 10303 - DNA, 20 bp, Homo Sapiens
tgttattgaccatgttctgc

SEQ ID NO: 10304 - DNA, 20 bp, Homo Sapiens
gttattgaccatgttctgca

SEQ ID NO: 10305 - DNA, 20 bp, Homo Sapiens
ttattgaccatgttctgcaa

SEQ ID NO: 10306 - DNA, 20 bp, Homo Sapiens
tattgaccatgttctgcaaa

SEQ ID NO: 10307 - DNA, 20 bp, Homo Sapiens
attgaccatgttctgcaaaa

SEQ ID NO: 10308 - DNA, 20 bp, Homo Sapiens
ttgaccatgttctgcaaaat

SEQ ID NO: 10309 - DNA, 20 bp, Homo Sapiens
tgaccatgttctgcaaaatt

SEQ ID NO: 10310 - DNA, 20 bp, Homo Sapiens
gaccatgttctgcaaaattg

SEQ ID NO: 10311 - DNA, 20 bp, Homo Sapiens
accatgttctgcaaaattgc

SEQ ID NO: 10312 - DNA, 20 bp, Homo Sapiens
ccatgttctgcaaaattgca

SEQ ID NO: 10313 - DNA, 20 bp, Homo Sapiens
catgttctgcaaaattgcag

SEQ ID NO: 10314 - DNA, 20 bp, Homo Sapiens
atgttctgcaaaattgcagt

SEQ ID NO: 10315 - DNA, 20 bp, Homo Sapiens
tgttctgcaaaattgcagtt

SEQ ID NO: 10316 - DNA, 20 bp, Homo Sapiens
gttctgcaaaattgcagtta

SEQ ID NO: 10317 - DNA, 20 bp, Homo Sapiens
ttctgcaaaattgcagttac

SEQ ID NO: 10318 - DNA, 20 bp, Homo Sapiens
tctgcaaaattgcagttact

SEQ ID NO: 10319 - DNA, 20 bp, Homo Sapiens
ctgcaaaattgcagttactc

SEQ ID NO: 10320 - DNA, 20 bp, Homo Sapiens
tgcaaaattgcagttactca

SEQ ID NO: 10321 - DNA, 20 bp, Homo Sapiens
gcaaaattgcagttactcag

SEQ ID NO: 10322 - DNA, 20 bp, Homo Sapiens
caaaattgcagttactcagt

SEQ ID NO: 10323 - DNA, 20 bp, Homo Sapiens
aaaattgcagttactcagtg

SEQ ID NO: 10324 - DNA, 20 bp, Homo Sapiens
aaattgcagttactcagtga

SEQ ID NO: 10325 - DNA, 20 bp, Homo Sapiens
aattgcagttactcagtgag

SEQ ID NO: 10326 - DNA, 20 bp, Homo Sapiens
attgcagttactcagtgagt

SEQ ID NO: 10327 - DNA, 20 bp, Homo Sapiens
ttgcagttactcagtgagtg

SEQ ID NO: 10328 - DNA, 20 bp, Homo Sapiens
tgcagttactcagtgagtga

SEQ ID NO: 10329 - DNA, 20 bp, Homo Sapiens
gcagttactcagtgagtgat

SEQ ID NO: 10330 - DNA, 20 bp, Homo Sapiens
cagttactcagtgagtgata

SEQ ID NO: 10331 - DNA, 20 bp, Homo Sapiens
agttactcagtgagtgatat

SEQ ID NO: 10332 - DNA, 20 bp, Homo Sapiens
gttactcagtgagtgatatc

SEQ ID NO: 10333 - DNA, 20 bp, Homo Sapiens
ttactcagtgagtgatatcc

SEQ ID NO: 10334 - DNA, 20 bp, Homo Sapiens
tactcagtgagtgatatccg

SEQ ID NO: 10335 - DNA, 20 bp, Homo Sapiens
actcagtgagtgatatccga

SEQ ID NO: 10336 - DNA, 20 bp, Homo Sapiens
ctcagtgagtgatatccgaa

SEQ ID NO: 10337 - DNA, 20 bp, Homo Sapiens
tcagtgagtgatatccgaaa

SEQ ID NO: 10338 - DNA, 20 bp, Homo Sapiens
cagtgagtgatatccgaaaa

SEQ ID NO: 10339 - DNA, 20 bp, Homo Sapiens
agtgagtgatatccgaaaaa

SEQ ID NO: 10340 - DNA, 20 bp, Homo Sapiens
gtgagtgatatccgaaaaag

SEQ ID NO: 10341 - DNA, 20 bp, Homo Sapiens
tgagtgatatccgaaaaagt

SEQ ID NO: 10342 - DNA, 20 bp, Homo Sapiens
gagtgatatccgaaaaagta

SEQ ID NO: 10343 - DNA, 20 bp, Homo Sapiens
agtgatatccgaaaaagtaa

SEQ ID NO: 10344 - DNA, 20 bp, Homo Sapiens
gtgatatccgaaaaagtaaa

SEQ ID NO: 10345 - DNA, 20 bp, Homo Sapiens
tgatatccgaaaaagtaaac

SEQ ID NO: 10346 - DNA, 20 bp, Homo Sapiens
gatatccgaaaaagtaaacg

SEQ ID NO: 10347 - DNA, 20 bp, Homo Sapiens
atatccgaaaaagtaaacgt

SEQ ID NO: 10348 - DNA, 20 bp, Homo Sapiens
tatccgaaaaagtaaacgtt

SEQ ID NO: 10349 - DNA, 20 bp, Homo Sapiens
atccgaaaaagtaaacgttt

SEQ ID NO: 10350 - DNA, 20 bp, Homo Sapiens
tccgaaaaagtaaacgttta

SEQ ID NO: 10351 - DNA, 20 bp, Homo Sapiens
ccgaaaaagtaaacgtttat

SEQ ID NO: 10352 - DNA, 20 bp, Homo Sapiens
cgaaaaagtaaacgtttatg

SEQ ID NO: 10353 - DNA, 20 bp, Homo Sapiens
gaaaaagtaaacgtttatga

SEQ ID NO: 10354 - DNA, 20 bp, Homo Sapiens
aaaaagtaaacgtttatgac

SEQ ID NO: 10355 - DNA, 20 bp, Homo Sapiens
aaaagtaaacgtttatgact

SEQ ID NO: 10356 - DNA, 20 bp, Homo Sapiens
aaagtaaacgtttatgacta

SEQ ID NO: 10357 - DNA, 20 bp, Homo Sapiens
aagtaaacgtttatgactat

SEQ ID NO: 10358 - DNA, 20 bp, Homo Sapiens
agtaaacgtttatgactata

SEQ ID NO: 10359 - DNA, 20 bp, Homo Sapiens
gtaaacgtttatgactatag

SEQ ID NO: 10360 - DNA, 20 bp, Homo Sapiens
taaacgtttatgactatagg

SEQ ID NO: 10361 - DNA, 20 bp, Homo Sapiens
aaacgtttatgactataggt

SEQ ID NO: 10362 - DNA, 20 bp, Homo Sapiens
aacgtttatgactataggta

SEQ ID NO: 10363 - DNA, 20 bp, Homo Sapiens
acgtttatgactataggtaa

SEQ ID NO: 10364 - DNA, 20 bp, Homo Sapiens
cgtttatgactataggtaat

SEQ ID NO: 10365 - DNA, 20 bp, Homo Sapiens
gtttatgactataggtaata

SEQ ID NO: 10366 - DNA, 20 bp, Homo Sapiens
tttatgactataggtaatat

SEQ ID NO: 10367 - DNA, 20 bp, Homo Sapiens
ttatgactataggtaatatt

SEQ ID NO: 10368 - DNA, 20 bp, Homo Sapiens
tatgactataggtaatattt

SEQ ID NO: 10369 - DNA, 20 bp, Homo Sapiens
atgactataggtaatattta

SEQ ID NO: 10370 - DNA, 20 bp, Homo Sapiens
tgactataggtaatatttaa

SEQ ID NO: 10371 - DNA, 20 bp, Homo Sapiens
gactataggtaatatttaag

SEQ ID NO: 10372 - DNA, 20 bp, Homo Sapiens
actataggtaatatttaaga

SEQ ID NO: 10373 - DNA, 20 bp, Homo Sapiens
ctataggtaatatttaagaa

SEQ ID NO: 10374 - DNA, 20 bp, Homo Sapiens
tataggtaatatttaagaaa

SEQ ID NO: 10375 - DNA, 20 bp, Homo Sapiens
ataggtaatatttaagaaaa

SEQ ID NO: 10376 - DNA, 20 bp, Homo Sapiens
taggtaatatttaagaaaat

SEQ ID NO: 10377 - DNA, 20 bp, Homo Sapiens
aggtaatatttaagaaaatg

SEQ ID NO: 10378 - DNA, 20 bp, Homo Sapiens
ggtaatatttaagaaaatgc

SEQ ID NO: 10379 - DNA, 20 bp, Homo Sapiens
gtaatatttaagaaaatgca

SEQ ID NO: 10380 - DNA, 20 bp, Homo Sapiens
taatatttaagaaaatgcat

SEQ ID NO: 10381 - DNA, 20 bp, Homo Sapiens
aatatttaagaaaatgcatg

SEQ ID NO: 10382 - DNA, 20 bp, Homo Sapiens
atatttaagaaaatgcatgg

SEQ ID NO: 10383 - DNA, 20 bp, Homo Sapiens
tatttaagaaaatgcatggt

SEQ ID NO: 10384 - DNA, 20 bp, Homo Sapiens
atttaagaaaatgcatggtt

SEQ ID NO: 10385 - DNA, 20 bp, Homo Sapiens
tttaagaaaatgcatggttc

SEQ ID NO: 10386 - DNA, 20 bp, Homo Sapiens
ttaagaaaatgcatggttca

SEQ ID NO: 10387 - DNA, 20 bp, Homo Sapiens
taagaaaatgcatggttcat

SEQ ID NO: 10388 - DNA, 20 bp, Homo Sapiens
aagaaaatgcatggttcatt

SEQ ID NO: 10389 - DNA, 20 bp, Homo Sapiens
agaaaatgcatggttcattt

SEQ ID NO: 10390 - DNA, 20 bp, Homo Sapiens
gaaaatgcatggttcatttt

SEQ ID NO: 10391 - DNA, 20 bp, Homo Sapiens
aaaatgcatggttcattttt

SEQ ID NO: 10392 - DNA, 20 bp, Homo Sapiens
aaatgcatggttcattttta

SEQ ID NO: 10393 - DNA, 20 bp, Homo Sapiens
aatgcatggttcatttttaa

SEQ ID NO: 10394 - DNA, 20 bp, Homo Sapiens
atgcatggttcatttttaag

SEQ ID NO: 10395 - DNA, 20 bp, Homo Sapiens
tgcatggttcatttttaagt

SEQ ID NO: 10396 - DNA, 20 bp, Homo Sapiens
gcatggttcatttttaagtt

SEQ ID NO: 10397 - DNA, 20 bp, Homo Sapiens
catggttcatttttaagttt

SEQ ID NO: 10398 - DNA, 20 bp, Homo Sapiens
atggttcatttttaagtttg

SEQ ID NO: 10399 - DNA, 20 bp, Homo Sapiens
tggttcatttttaagtttgg

SEQ ID NO: 10400 - DNA, 20 bp, Homo Sapiens
ggttcatttttaagtttgga

SEQ ID NO: 10401 - DNA, 20 bp, Homo Sapiens
gttcatttttaagtttggaa

SEQ ID NO: 10402 - DNA, 20 bp, Homo Sapiens
ttcatttttaagtttggaat

SEQ ID NO: 10403 - DNA, 20 bp, Homo Sapiens
tcatttttaagtttggaatt

SEQ ID NO: 10404 - DNA, 20 bp, Homo Sapiens
catttttaagtttggaattt

SEQ ID NO: 10405 - DNA, 20 bp, Homo Sapiens
atttttaagtttggaatttt

SEQ ID NO: 10406 - DNA, 20 bp, Homo Sapiens
tttttaagtttggaattttt

SEQ ID NO: 10407 - DNA, 20 bp, Homo Sapiens
ttttaagtttggaattttta

SEQ ID NO: 10408 - DNA, 20 bp, Homo Sapiens
tttaagtttggaatttttat

SEQ ID NO: 10409 - DNA, 20 bp, Homo Sapiens
ttaagtttggaatttttatc

SEQ ID NO: 10410 - DNA, 20 bp, Homo Sapiens
taagtttggaatttttatct

SEQ ID NO: 10411 - DNA, 20 bp, Homo Sapiens
aagtttggaatttttatcta

SEQ ID NO: 10412 - DNA, 20 bp, Homo Sapiens
agtttggaatttttatctat

SEQ ID NO: 10413 - DNA, 20 bp, Homo Sapiens
gtttggaatttttatctata

SEQ ID NO: 10414 - DNA, 20 bp, Homo Sapiens
tttggaatttttatctatat

SEQ ID NO: 10415 - DNA, 20 bp, Homo Sapiens
ttggaatttttatctatatt

SEQ ID NO: 10416 - DNA, 20 bp, Homo Sapiens
tggaatttttatctatattt

SEQ ID NO: 10417 - DNA, 20 bp, Homo Sapiens
ggaatttttatctatatttc

SEQ ID NO: 10418 - DNA, 20 bp, Homo Sapiens
gaatttttatctatatttct

SEQ ID NO: 10419 - DNA, 20 bp, Homo Sapiens
aatttttatctatatttctc

SEQ ID NO: 10420 - DNA, 20 bp, Homo Sapiens
atttttatctatatttctca

SEQ ID NO: 10421 - DNA, 20 bp, Homo Sapiens
tttttatctatatttctcac

SEQ ID NO: 10422 - DNA, 20 bp, Homo Sapiens
ttttatctatatttctcaca

SEQ ID NO: 10423 - DNA, 20 bp, Homo Sapiens
tttatctatatttctcacag

SEQ ID NO: 10424 - DNA, 20 bp, Homo Sapiens
ttatctatatttctcacaga

SEQ ID NO: 10425 - DNA, 20 bp, Homo Sapiens
tatctatatttctcacagat

SEQ ID NO: 10426 - DNA, 20 bp, Homo Sapiens
atctatatttctcacagatg

SEQ ID NO: 10427 - DNA, 20 bp, Homo Sapiens
tctatatttctcacagatgt

SEQ ID NO: 10428 - DNA, 20 bp, Homo Sapiens
ctatatttctcacagatgtg

SEQ ID NO: 10429 - DNA, 20 bp, Homo Sapiens
tatatttctcacagatgtgc

SEQ ID NO: 10430 - DNA, 20 bp, Homo Sapiens
atatttctcacagatgtgca

SEQ ID NO: 10431 - DNA, 20 bp, Homo Sapiens
tatttctcacagatgtgcag

SEQ ID NO: 10432 - DNA, 20 bp, Homo Sapiens
atttctcacagatgtgcagt

SEQ ID NO: 10433 - DNA, 20 bp, Homo Sapiens
tttctcacagatgtgcagtg

SEQ ID NO: 10434 - DNA, 20 bp, Homo Sapiens
ttctcacagatgtgcagtgc

SEQ ID NO: 10435 - DNA, 20 bp, Homo Sapiens
tctcacagatgtgcagtgca

SEQ ID NO: 10436 - DNA, 20 bp, Homo Sapiens
ctcacagatgtgcagtgcac

SEQ ID NO: 10437 - DNA, 20 bp, Homo Sapiens
tcacagatgtgcagtgcaca

SEQ ID NO: 10438 - DNA, 20 bp, Homo Sapiens
cacagatgtgcagtgcacat

SEQ ID NO: 10439 - DNA, 20 bp, Homo Sapiens
acagatgtgcagtgcacatg

SEQ ID NO: 10440 - DNA, 20 bp, Homo Sapiens
cagatgtgcagtgcacatgc

SEQ ID NO: 10441 - DNA, 20 bp, Homo Sapiens
agatgtgcagtgcacatgca

SEQ ID NO: 10442 - DNA, 20 bp, Homo Sapiens
gatgtgcagtgcacatgcag

SEQ ID NO: 10443 - DNA, 20 bp, Homo Sapiens
atgtgcagtgcacatgcagg

SEQ ID NO: 10444 - DNA, 20 bp, Homo Sapiens
tgtgcagtgcacatgcaggc

SEQ ID NO: 10445 - DNA, 20 bp, Homo Sapiens
gtgcagtgcacatgcaggcc

SEQ ID NO: 10446 - DNA, 20 bp, Homo Sapiens
tgcagtgcacatgcaggcct

SEQ ID NO: 10447 - DNA, 20 bp, Homo Sapiens
gcagtgcacatgcaggccta

SEQ ID NO: 10448 - DNA, 20 bp, Homo Sapiens
cagtgcacatgcaggcctaa

SEQ ID NO: 10449 - DNA, 20 bp, Homo Sapiens
agtgcacatgcaggcctaag

SEQ ID NO: 10450 - DNA, 20 bp, Homo Sapiens
gtgcacatgcaggcctaagt

SEQ ID NO: 10451 - DNA, 20 bp, Homo Sapiens
tgcacatgcaggcctaagta

SEQ ID NO: 10452 - DNA, 20 bp, Homo Sapiens
gcacatgcaggcctaagtat

SEQ ID NO: 10453 - DNA, 20 bp, Homo Sapiens
cacatgcaggcctaagtata

SEQ ID NO: 10454 - DNA, 20 bp, Homo Sapiens
acatgcaggcctaagtatat

SEQ ID NO: 10455 - DNA, 20 bp, Homo Sapiens
catgcaggcctaagtatatg

SEQ ID NO: 10456 - DNA, 20 bp, Homo Sapiens
atgcaggcctaagtatatgt

SEQ ID NO: 10457 - DNA, 20 bp, Homo Sapiens
tgcaggcctaagtatatgtt

SEQ ID NO: 10458 - DNA, 20 bp, Homo Sapiens
gcaggcctaagtatatgttg

SEQ ID NO: 10459 - DNA, 20 bp, Homo Sapiens
caggcctaagtatatgttgt

SEQ ID NO: 10460 - DNA, 20 bp, Homo Sapiens
aggcctaagtatatgttgtg

SEQ ID NO: 10461 - DNA, 20 bp, Homo Sapiens
ggcctaagtatatgttgtgt

SEQ ID NO: 10462 - DNA, 20 bp, Homo Sapiens
gcctaagtatatgttgtgtg

SEQ ID NO: 10463 - DNA, 20 bp, Homo Sapiens
cctaagtatatgttgtgtgt

SEQ ID NO: 10464 - DNA, 20 bp, Homo Sapiens
ctaagtatatgttgtgtgtg

SEQ ID NO: 10465 - DNA, 20 bp, Homo Sapiens
taagtatatgttgtgtgtgt

SEQ ID NO: 10466 - DNA, 20 bp, Homo Sapiens
aagtatatgttgtgtgtgtt

SEQ ID NO: 10467 - DNA, 20 bp, Homo Sapiens
agtatatgttgtgtgtgttg

SEQ ID NO: 10468 - DNA, 20 bp, Homo Sapiens
gtatatgttgtgtgtgttgt

SEQ ID NO: 10469 - DNA, 20 bp, Homo Sapiens
tatatgttgtgtgtgttgtt

SEQ ID NO: 10470 - DNA, 20 bp, Homo Sapiens
atatgttgtgtgtgttgttt

SEQ ID NO: 10471 - DNA, 20 bp, Homo Sapiens
tatgttgtgtgtgttgtttg

SEQ ID NO: 10472 - DNA, 20 bp, Homo Sapiens
atgttgtgtgtgttgtttgt

SEQ ID NO: 10473 - DNA, 20 bp, Homo Sapiens
tgttgtgtgtgttgtttgtc

SEQ ID NO: 10474 - DNA, 20 bp, Homo Sapiens
gttgtgtgtgttgtttgtct

SEQ ID NO: 10475 - DNA, 20 bp, Homo Sapiens
ttgtgtgtgttgtttgtctt

SEQ ID NO: 10476 - DNA, 20 bp, Homo Sapiens
tgtgtgtgttgtttgtcttt

SEQ ID NO: 10477 - DNA, 20 bp, Homo Sapiens
gtgtgtgttgtttgtctttg

SEQ ID NO: 10478 - DNA, 20 bp, Homo Sapiens
tgtgtgttgtttgtctttga

SEQ ID NO: 10479 - DNA, 20 bp, Homo Sapiens
gtgtgttgtttgtctttgat

SEQ ID NO: 10480 - DNA, 20 bp, Homo Sapiens
tgtgttgtttgtctttgatg

SEQ ID NO: 10481 - DNA, 20 bp, Homo Sapiens
gtgttgtttgtctttgatgt

SEQ ID NO: 10482 - DNA, 20 bp, Homo Sapiens
tgttgtttgtctttgatgtc

SEQ ID NO: 10483 - DNA, 20 bp, Homo Sapiens
gttgtttgtctttgatgtca

SEQ ID NO: 10484 - DNA, 20 bp, Homo Sapiens
ttgtttgtctttgatgtcat

SEQ ID NO: 10485 - DNA, 20 bp, Homo Sapiens
tgtttgtctttgatgtcatg

SEQ ID NO: 10486 - DNA, 20 bp, Homo Sapiens
gtttgtctttgatgtcatgg

SEQ ID NO: 10487 - DNA, 20 bp, Homo Sapiens
tttgtctttgatgtcatggt

SEQ ID NO: 10488 - DNA, 20 bp, Homo Sapiens
ttgtctttgatgtcatggtc

SEQ ID NO: 10489 - DNA, 20 bp, Homo Sapiens
tgtctttgatgtcatggtcc

SEQ ID NO: 10490 - DNA, 20 bp, Homo Sapiens
gtctttgatgtcatggtccc

SEQ ID NO: 10491 - DNA, 20 bp, Homo Sapiens
tctttgatgtcatggtcccc

SEQ ID NO: 10492 - DNA, 20 bp, Homo Sapiens
ctttgatgtcatggtcccct

SEQ ID NO: 10493 - DNA, 20 bp, Homo Sapiens
tttgatgtcatggtcccctc

SEQ ID NO: 10494 - DNA, 20 bp, Homo Sapiens
ttgatgtcatggtcccctct

SEQ ID NO: 10495 - DNA, 20 bp, Homo Sapiens
tgatgtcatggtcccctctc

SEQ ID NO: 10496 - DNA, 20 bp, Homo Sapiens
gatgtcatggtcccctctct

SEQ ID NO: 10497 - DNA, 20 bp, Homo Sapiens
atgtcatggtcccctctctt

SEQ ID NO: 10498 - DNA, 20 bp, Homo Sapiens
tgtcatggtcccctctctta

SEQ ID NO: 10499 - DNA, 20 bp, Homo Sapiens
gtcatggtcccctctcttag

SEQ ID NO: 10500 - DNA, 20 bp, Homo Sapiens
tcatggtcccctctcttagg

SEQ ID NO: 10501 - DNA, 20 bp, Homo Sapiens
catggtcccctctcttaggt

SEQ ID NO: 10502 - DNA, 20 bp, Homo Sapiens
atggtcccctctcttaggtg

SEQ ID NO: 10503 - DNA, 20 bp, Homo Sapiens
tggtcccctctcttaggtgc

SEQ ID NO: 10504 - DNA, 20 bp, Homo Sapiens
ggtcccctctcttaggtgct

SEQ ID NO: 10505 - DNA, 20 bp, Homo Sapiens
gtcccctctcttaggtgctc

SEQ ID NO: 10506 - DNA, 20 bp, Homo Sapiens
tcccctctcttaggtgctca

SEQ ID NO: 10507 - DNA, 20 bp, Homo Sapiens
cccctctcttaggtgctcac

SEQ ID NO: 10508 - DNA, 20 bp, Homo Sapiens
ccctctcttaggtgctcact

SEQ ID NO: 10509 - DNA, 20 bp, Homo Sapiens
cctctcttaggtgctcactc

SEQ ID NO: 10510 - DNA, 20 bp, Homo Sapiens
ctctcttaggtgctcactcg

SEQ ID NO: 10511 - DNA, 20 bp, Homo Sapiens
tctcttaggtgctcactcgc

SEQ ID NO: 10512 - DNA, 20 bp, Homo Sapiens
ctcttaggtgctcactcgct

SEQ ID NO: 10513 - DNA, 20 bp, Homo Sapiens
tcttaggtgctcactcgctt

SEQ ID NO: 10514 - DNA, 20 bp, Homo Sapiens
cttaggtgctcactcgcttt

SEQ ID NO: 10515 - DNA, 20 bp, Homo Sapiens
ttaggtgctcactcgctttg

SEQ ID NO: 10516 - DNA, 20 bp, Homo Sapiens
taggtgctcactcgctttgg

SEQ ID NO: 10517 - DNA, 20 bp, Homo Sapiens
aggtgctcactcgctttggg

SEQ ID NO: 10518 - DNA, 20 bp, Homo Sapiens
ggtgctcactcgctttgggt

SEQ ID NO: 10519 - DNA, 20 bp, Homo Sapiens
gtgctcactcgctttgggtg

SEQ ID NO: 10520 - DNA, 20 bp, Homo Sapiens
tgctcactcgctttgggtgc

SEQ ID NO: 10521 - DNA, 20 bp, Homo Sapiens
gctcactcgctttgggtgca

SEQ ID NO: 10522 - DNA, 20 bp, Homo Sapiens
ctcactcgctttgggtgcac

SEQ ID NO: 10523 - DNA, 20 bp, Homo Sapiens
tcactcgctttgggtgcacc

SEQ ID NO: 10524 - DNA, 20 bp, Homo Sapiens
cactcgctttgggtgcacct

SEQ ID NO: 10525 - DNA, 20 bp, Homo Sapiens
actcgctttgggtgcacctg

SEQ ID NO: 10526 - DNA, 20 bp, Homo Sapiens
ctcgctttgggtgcacctgg

SEQ ID NO: 10527 - DNA, 20 bp, Homo Sapiens
tcgctttgggtgcacctggc

SEQ ID NO: 10528 - DNA, 20 bp, Homo Sapiens
cgctttgggtgcacctggcc

SEQ ID NO: 10529 - DNA, 20 bp, Homo Sapiens
gctttgggtgcacctggcct

SEQ ID NO: 10530 - DNA, 20 bp, Homo Sapiens
ctttgggtgcacctggcctg

SEQ ID NO: 10531 - DNA, 20 bp, Homo Sapiens
tttgggtgcacctggcctgc

SEQ ID NO: 10532 - DNA, 20 bp, Homo Sapiens
ttgggtgcacctggcctgct

SEQ ID NO: 10533 - DNA, 20 bp, Homo Sapiens
tgggtgcacctggcctgctc

SEQ ID NO: 10534 - DNA, 20 bp, Homo Sapiens
gggtgcacctggcctgctct

SEQ ID NO: 10535 - DNA, 20 bp, Homo Sapiens
ggtgcacctggcctgctctt

SEQ ID NO: 10536 - DNA, 20 bp, Homo Sapiens
gtgcacctggcctgctcttc

SEQ ID NO: 10537 - DNA, 20 bp, Homo Sapiens
tgcacctggcctgctcttcc

SEQ ID NO: 10538 - DNA, 20 bp, Homo Sapiens
gcacctggcctgctcttccc

SEQ ID NO: 10539 - DNA, 20 bp, Homo Sapiens
cacctggcctgctcttccca

SEQ ID NO: 10540 - DNA, 20 bp, Homo Sapiens
acctggcctgctcttcccat

SEQ ID NO: 10541 - DNA, 20 bp, Homo Sapiens
cctggcctgctcttcccatg

SEQ ID NO: 10542 - DNA, 20 bp, Homo Sapiens
ctggcctgctcttcccatgt

SEQ ID NO: 10543 - DNA, 20 bp, Homo Sapiens
tggcctgctcttcccatgtt

SEQ ID NO: 10544 - DNA, 20 bp, Homo Sapiens
ggcctgctcttcccatgttg

SEQ ID NO: 10545 - DNA, 20 bp, Homo Sapiens
gcctgctcttcccatgttgg

SEQ ID NO: 10546 - DNA, 20 bp, Homo Sapiens
cctgctcttcccatgttggc

SEQ ID NO: 10547 - DNA, 20 bp, Homo Sapiens
ctgctcttcccatgttggcc

SEQ ID NO: 10548 - DNA, 20 bp, Homo Sapiens
tgctcttcccatgttggcct

SEQ ID NO: 10549 - DNA, 20 bp, Homo Sapiens
gctcttcccatgttggcctc

SEQ ID NO: 10550 - DNA, 20 bp, Homo Sapiens
ctcttcccatgttggcctct

SEQ ID NO: 10551 - DNA, 20 bp, Homo Sapiens
tcttcccatgttggcctctg

SEQ ID NO: 10552 - DNA, 20 bp, Homo Sapiens
cttcccatgttggcctctgc

SEQ ID NO: 10553 - DNA, 20 bp, Homo Sapiens
ttcccatgttggcctctgca

SEQ ID NO: 10554 - DNA, 20 bp, Homo Sapiens
tcccatgttggcctctgcaa

SEQ ID NO: 10555 - DNA, 20 bp, Homo Sapiens
cccatgttggcctctgcaac

SEQ ID NO: 10556 - DNA, 20 bp, Homo Sapiens
ccatgttggcctctgcaacc

SEQ ID NO: 10557 - DNA, 20 bp, Homo Sapiens
catgttggcctctgcaacca

SEQ ID NO: 10558 - DNA, 20 bp, Homo Sapiens
atgttggcctctgcaaccac

SEQ ID NO: 10559 - DNA, 20 bp, Homo Sapiens
tgttggcctctgcaaccaca

SEQ ID NO: 10560 - DNA, 20 bp, Homo Sapiens
gttggcctctgcaaccacac

SEQ ID NO: 10561 - DNA, 20 bp, Homo Sapiens
ttggcctctgcaaccacaca

SEQ ID NO: 10562 - DNA, 20 bp, Homo Sapiens
tggcctctgcaaccacacag

SEQ ID NO: 10563 - DNA, 20 bp, Homo Sapiens
ggcctctgcaaccacacagg

SEQ ID NO: 10564 - DNA, 20 bp, Homo Sapiens
gcctctgcaaccacacaggg

SEQ ID NO: 10565 - DNA, 20 bp, Homo Sapiens
cctctgcaaccacacaggga

SEQ ID NO: 10566 - DNA, 20 bp, Homo Sapiens
ctctgcaaccacacagggat

SEQ ID NO: 10567 - DNA, 20 bp, Homo Sapiens
tctgcaaccacacagggata

SEQ ID NO: 10568 - DNA, 20 bp, Homo Sapiens
ctgcaaccacacagggatat

SEQ ID NO: 10569 - DNA, 20 bp, Homo Sapiens
tgcaaccacacagggatatt

SEQ ID NO: 10570 - DNA, 20 bp, Homo Sapiens
gcaaccacacagggatattt

SEQ ID NO: 10571 - DNA, 20 bp, Homo Sapiens
caaccacacagggatatttc

SEQ ID NO: 10572 - DNA, 20 bp, Homo Sapiens
aaccacacagggatatttct

SEQ ID NO: 10573 - DNA, 20 bp, Homo Sapiens
accacacagggatatttctg

SEQ ID NO: 10574 - DNA, 20 bp, Homo Sapiens
ccacacagggatatttctgc

SEQ ID NO: 10575 - DNA, 20 bp, Homo Sapiens
cacacagggatatttctgct

SEQ ID NO: 10576 - DNA, 20 bp, Homo Sapiens
acacagggatatttctgcta

SEQ ID NO: 10577 - DNA, 20 bp, Homo Sapiens
cacagggatatttctgctat

SEQ ID NO: 10578 - DNA, 20 bp, Homo Sapiens
acagggatatttctgctatg

SEQ ID NO: 10579 - DNA, 20 bp, Homo Sapiens
cagggatatttctgctatgc

SEQ ID NO: 10580 - DNA, 20 bp, Homo Sapiens
agggatatttctgctatgca

SEQ ID NO: 10581 - DNA, 20 bp, Homo Sapiens
gggatatttctgctatgcac

SEQ ID NO: 10582 - DNA, 20 bp, Homo Sapiens
ggatatttctgctatgcacc

SEQ ID NO: 10583 - DNA, 20 bp, Homo Sapiens
gatatttctgctatgcacca

SEQ ID NO: 10584 - DNA, 20 bp, Homo Sapiens
atatttctgctatgcaccag

SEQ ID NO: 10585 - DNA, 20 bp, Homo Sapiens
tatttctgctatgcaccagc

SEQ ID NO: 10586 - DNA, 20 bp, Homo Sapiens
atttctgctatgcaccagcc

SEQ ID NO: 10587 - DNA, 20 bp, Homo Sapiens
tttctgctatgcaccagcct

SEQ ID NO: 10588 - DNA, 20 bp, Homo Sapiens
ttctgctatgcaccagcctc

SEQ ID NO: 10589 - DNA, 20 bp, Homo Sapiens
tctgctatgcaccagcctca

SEQ ID NO: 10590 - DNA, 20 bp, Homo Sapiens
ctgctatgcaccagcctcac

SEQ ID NO: 10591 - DNA, 20 bp, Homo Sapiens
tgctatgcaccagcctcact

SEQ ID NO: 10592 - DNA, 20 bp, Homo Sapiens
gctatgcaccagcctcactc

SEQ ID NO: 10593 - DNA, 20 bp, Homo Sapiens
ctatgcaccagcctcactcc

SEQ ID NO: 10594 - DNA, 20 bp, Homo Sapiens
tatgcaccagcctcactcca

SEQ ID NO: 10595 - DNA, 20 bp, Homo Sapiens
atgcaccagcctcactccac

SEQ ID NO: 10596 - DNA, 20 bp, Homo Sapiens
tgcaccagcctcactccacc

SEQ ID NO: 10597 - DNA, 20 bp, Homo Sapiens
gcaccagcctcactccacct

SEQ ID NO: 10598 - DNA, 20 bp, Homo Sapiens
caccagcctcactccacctt

SEQ ID NO: 10599 - DNA, 20 bp, Homo Sapiens
accagcctcactccaccttc

SEQ ID NO: 10600 - DNA, 20 bp, Homo Sapiens
ccagcctcactccaccttcc

SEQ ID NO: 10601 - DNA, 20 bp, Homo Sapiens
cagcctcactccaccttcct

SEQ ID NO: 10602 - DNA, 20 bp, Homo Sapiens
agcctcactccaccttcctt

SEQ ID NO: 10603 - DNA, 20 bp, Homo Sapiens
gcctcactccaccttccttc

SEQ ID NO: 10604 - DNA, 20 bp, Homo Sapiens
cctcactccaccttccttcc

SEQ ID NO: 10605 - DNA, 20 bp, Homo Sapiens
ctcactccaccttccttcca

SEQ ID NO: 10606 - DNA, 20 bp, Homo Sapiens
tcactccaccttccttccat

SEQ ID NO: 10607 - DNA, 20 bp, Homo Sapiens
cactccaccttccttccatc

SEQ ID NO: 10608 - DNA, 20 bp, Homo Sapiens
actccaccttccttccatca

SEQ ID NO: 10609 - DNA, 20 bp, Homo Sapiens
ctccaccttccttccatcaa

SEQ ID NO: 10610 - DNA, 20 bp, Homo Sapiens
tccaccttccttccatcaaa

SEQ ID NO: 10611 - DNA, 20 bp, Homo Sapiens
ccaccttccttccatcaaaa

SEQ ID NO: 10612 - DNA, 20 bp, Homo Sapiens
caccttccttccatcaaaaa

SEQ ID NO: 10613 - DNA, 20 bp, Homo Sapiens
accttccttccatcaaaaat

SEQ ID NO: 10614 - DNA, 20 bp, Homo Sapiens
ccttccttccatcaaaaata

SEQ ID NO: 10615 - DNA, 20 bp, Homo Sapiens
cttccttccatcaaaaatat

SEQ ID NO: 10616 - DNA, 20 bp, Homo Sapiens
ttccttccatcaaaaatatg

SEQ ID NO: 10617 - DNA, 20 bp, Homo Sapiens
tccttccatcaaaaatatgt

SEQ ID NO: 10618 - DNA, 20 bp, Homo Sapiens
ccttccatcaaaaatatgtg

SEQ ID NO: 10619 - DNA, 20 bp, Homo Sapiens
cttccatcaaaaatatgtgt

SEQ ID NO: 10620 - DNA, 20 bp, Homo Sapiens
ttccatcaaaaatatgtgtg

SEQ ID NO: 10621 - DNA, 20 bp, Homo Sapiens
tccatcaaaaatatgtgtgt

SEQ ID NO: 10622 - DNA, 20 bp, Homo Sapiens
ccatcaaaaatatgtgtgtg

SEQ ID NO: 10623 - DNA, 20 bp, Homo Sapiens
catcaaaaatatgtgtgtgt

SEQ ID NO: 10624 - DNA, 20 bp, Homo Sapiens
atcaaaaatatgtgtgtgtg

SEQ ID NO: 10625 - DNA, 20 bp, Homo Sapiens
tcaaaaatatgtgtgtgtgt

SEQ ID NO: 10626 - DNA, 20 bp, Homo Sapiens
caaaaatatgtgtgtgtgtc

SEQ ID NO: 10627 - DNA, 20 bp, Homo Sapiens
aaaaatatgtgtgtgtgtct

SEQ ID NO: 10628 - DNA, 20 bp, Homo Sapiens
aaaatatgtgtgtgtgtctc

SEQ ID NO: 10629 - DNA, 20 bp, Homo Sapiens
aaatatgtgtgtgtgtctca

SEQ ID NO: 10630 - DNA, 20 bp, Homo Sapiens
aatatgtgtgtgtgtctcag

SEQ ID NO: 10631 - DNA, 20 bp, Homo Sapiens
atatgtgtgtgtgtctcagt

SEQ ID NO: 10632 - DNA, 20 bp, Homo Sapiens
tatgtgtgtgtgtctcagtc

SEQ ID NO: 10633 - DNA, 20 bp, Homo Sapiens
atgtgtgtgtgtctcagtcc

SEQ ID NO: 10634 - DNA, 20 bp, Homo Sapiens
tgtgtgtgtgtctcagtccc

SEQ ID NO: 10635 - DNA, 20 bp, Homo Sapiens
gtgtgtgtgtctcagtccct

SEQ ID NO: 10636 - DNA, 20 bp, Homo Sapiens
tgtgtgtgtctcagtccctg

SEQ ID NO: 10637 - DNA, 20 bp, Homo Sapiens
gtgtgtgtctcagtccctgt

SEQ ID NO: 10638 - DNA, 20 bp, Homo Sapiens
tgtgtgtctcagtccctgta

SEQ ID NO: 10639 - DNA, 20 bp, Homo Sapiens
gtgtgtctcagtccctgtaa

SEQ ID NO: 10640 - DNA, 20 bp, Homo Sapiens
tgtgtctcagtccctgtaag

SEQ ID NO: 10641 - DNA, 20 bp, Homo Sapiens
gtgtctcagtccctgtaagt

SEQ ID NO: 10642 - DNA, 20 bp, Homo Sapiens
tgtctcagtccctgtaagtc

SEQ ID NO: 10643 - DNA, 20 bp, Homo Sapiens
gtctcagtccctgtaagtca

SEQ ID NO: 10644 - DNA, 20 bp, Homo Sapiens
tctcagtccctgtaagtcat

SEQ ID NO: 10645 - DNA, 20 bp, Homo Sapiens
ctcagtccctgtaagtcatg

SEQ ID NO: 10646 - DNA, 20 bp, Homo Sapiens
tcagtccctgtaagtcatgt

SEQ ID NO: 10647 - DNA, 20 bp, Homo Sapiens
cagtccctgtaagtcatgtc

SEQ ID NO: 10648 - DNA, 20 bp, Homo Sapiens
agtccctgtaagtcatgtcc

SEQ ID NO: 10649 - DNA, 20 bp, Homo Sapiens
gtccctgtaagtcatgtcct

SEQ ID NO: 10650 - DNA, 20 bp, Homo Sapiens
tccctgtaagtcatgtcctt

SEQ ID NO: 10651 - DNA, 20 bp, Homo Sapiens
ccctgtaagtcatgtccttc

SEQ ID NO: 10652 - DNA, 20 bp, Homo Sapiens
cctgtaagtcatgtccttca

SEQ ID NO: 10653 - DNA, 20 bp, Homo Sapiens
ctgtaagtcatgtccttcac

SEQ ID NO: 10654 - DNA, 20 bp, Homo Sapiens
tgtaagtcatgtccttcaca

SEQ ID NO: 10655 - DNA, 20 bp, Homo Sapiens
gtaagtcatgtccttcacag

SEQ ID NO: 10656 - DNA, 20 bp, Homo Sapiens
taagtcatgtccttcacagg

SEQ ID NO: 10657 - DNA, 20 bp, Homo Sapiens
aagtcatgtccttcacaggg

SEQ ID NO: 10658 - DNA, 20 bp, Homo Sapiens
agtcatgtccttcacaggga

SEQ ID NO: 10659 - DNA, 20 bp, Homo Sapiens
gtcatgtccttcacagggag

SEQ ID NO: 10660 - DNA, 20 bp, Homo Sapiens
tcatgtccttcacagggaga

SEQ ID NO: 10661 - DNA, 20 bp, Homo Sapiens
catgtccttcacagggagaa

SEQ ID NO: 10662 - DNA, 20 bp, Homo Sapiens
atgtccttcacagggagaat

SEQ ID NO: 10663 - DNA, 20 bp, Homo Sapiens
tgtccttcacagggagaatt

SEQ ID NO: 10664 - DNA, 20 bp, Homo Sapiens
gtccttcacagggagaatta

SEQ ID NO: 10665 - DNA, 20 bp, Homo Sapiens
tccttcacagggagaattaa

SEQ ID NO: 10666 - DNA, 20 bp, Homo Sapiens
ccttcacagggagaattaac

SEQ ID NO: 10667 - DNA, 20 bp, Homo Sapiens
cttcacagggagaattaacc

SEQ ID NO: 10668 - DNA, 20 bp, Homo Sapiens
ttcacagggagaattaaccc

SEQ ID NO: 10669 - DNA, 20 bp, Homo Sapiens
tcacagggagaattaaccct

SEQ ID NO: 10670 - DNA, 20 bp, Homo Sapiens
cacagggagaattaaccctt

SEQ ID NO: 10671 - DNA, 20 bp, Homo Sapiens
acagggagaattaacccttc

SEQ ID NO: 10672 - DNA, 20 bp, Homo Sapiens
cagggagaattaacccttcg

SEQ ID NO: 10673 - DNA, 20 bp, Homo Sapiens
agggagaattaacccttcga

SEQ ID NO: 10674 - DNA, 20 bp, Homo Sapiens
gggagaattaacccttcgat

SEQ ID NO: 10675 - DNA, 20 bp, Homo Sapiens
ggagaattaacccttcgata

SEQ ID NO: 10676 - DNA, 20 bp, Homo Sapiens
gagaattaacccttcgatat

SEQ ID NO: 10677 - DNA, 20 bp, Homo Sapiens
agaattaacccttcgatata

SEQ ID NO: 10678 - DNA, 20 bp, Homo Sapiens
gaattaacccttcgatatac

SEQ ID NO: 10679 - DNA, 20 bp, Homo Sapiens
aattaacccttcgatataca

SEQ ID NO: 10680 - DNA, 20 bp, Homo Sapiens
attaacccttcgatatacat

SEQ ID NO: 10681 - DNA, 20 bp, Homo Sapiens
ttaacccttcgatatacatg

SEQ ID NO: 10682 - DNA, 20 bp, Homo Sapiens
taacccttcgatatacatgg

SEQ ID NO: 10683 - DNA, 20 bp, Homo Sapiens
aacccttcgatatacatggc

SEQ ID NO: 10684 - DNA, 20 bp, Homo Sapiens
acccttcgatatacatggca

SEQ ID NO: 10685 - DNA, 20 bp, Homo Sapiens
cccttcgatatacatggcag

SEQ ID NO: 10686 - DNA, 20 bp, Homo Sapiens
ccttcgatatacatggcaga

SEQ ID NO: 10687 - DNA, 20 bp, Homo Sapiens
cttcgatatacatggcagag

SEQ ID NO: 10688 - DNA, 20 bp, Homo Sapiens
ttcgatatacatggcagagt

SEQ ID NO: 10689 - DNA, 20 bp, Homo Sapiens
tcgatatacatggcagagtt

SEQ ID NO: 10690 - DNA, 20 bp, Homo Sapiens
cgatatacatggcagagttt

SEQ ID NO: 10691 - DNA, 20 bp, Homo Sapiens
gatatacatggcagagtttt

SEQ ID NO: 10692 - DNA, 20 bp, Homo Sapiens
atatacatggcagagttttg

SEQ ID NO: 10693 - DNA, 20 bp, Homo Sapiens
tatacatggcagagttttgt

SEQ ID NO: 10694 - DNA, 20 bp, Homo Sapiens
atacatggcagagttttgtg

SEQ ID NO: 10695 - DNA, 20 bp, Homo Sapiens
tacatggcagagttttgtgg

SEQ ID NO: 10696 - DNA, 20 bp, Homo Sapiens
acatggcagagttttgtggg

SEQ ID NO: 10697 - DNA, 20 bp, Homo Sapiens
catggcagagttttgtggga

SEQ ID NO: 10698 - DNA, 20 bp, Homo Sapiens
atggcagagttttgtgggaa

SEQ ID NO: 10699 - DNA, 20 bp, Homo Sapiens
tggcagagttttgtgggaaa

SEQ ID NO: 10700 - DNA, 20 bp, Homo Sapiens
ggcagagttttgtgggaaaa

SEQ ID NO: 10701 - DNA, 20 bp, Homo Sapiens
gcagagttttgtgggaaaag

SEQ ID NO: 10702 - DNA, 20 bp, Homo Sapiens
cagagttttgtgggaaaaga

SEQ ID NO: 10703 - DNA, 20 bp, Homo Sapiens
agagttttgtgggaaaagaa

SEQ ID NO: 10704 - DNA, 20 bp, Homo Sapiens
gagttttgtgggaaaagaat

SEQ ID NO: 10705 - DNA, 20 bp, Homo Sapiens
agttttgtgggaaaagaatt

SEQ ID NO: 10706 - DNA, 20 bp, Homo Sapiens
gttttgtgggaaaagaattg

SEQ ID NO: 10707 - DNA, 20 bp, Homo Sapiens
ttttgtgggaaaagaattga

SEQ ID NO: 10708 - DNA, 20 bp, Homo Sapiens
tttgtgggaaaagaattgaa

SEQ ID NO: 10709 - DNA, 20 bp, Homo Sapiens
ttgtgggaaaagaattgaat

SEQ ID NO: 10710 - DNA, 20 bp, Homo Sapiens
tgtgggaaaagaattgaatg

SEQ ID NO: 10711 - DNA, 20 bp, Homo Sapiens
gtgggaaaagaattgaatga

SEQ ID NO: 10712 - DNA, 20 bp, Homo Sapiens
tgggaaaagaattgaatgaa

SEQ ID NO: 10713 - DNA, 20 bp, Homo Sapiens
gggaaaagaattgaatgaaa

SEQ ID NO: 10714 - DNA, 20 bp, Homo Sapiens
ggaaaagaattgaatgaaaa

SEQ ID NO: 10715 - DNA, 20 bp, Homo Sapiens
gaaaagaattgaatgaaaag

SEQ ID NO: 10716 - DNA, 20 bp, Homo Sapiens
aaaagaattgaatgaaaagt

SEQ ID NO: 10717 - DNA, 20 bp, Homo Sapiens
aaagaattgaatgaaaagtc

SEQ ID NO: 10718 - DNA, 20 bp, Homo Sapiens
aagaattgaatgaaaagtca

SEQ ID NO: 10719 - DNA, 20 bp, Homo Sapiens
agaattgaatgaaaagtcag

SEQ ID NO: 10720 - DNA, 20 bp, Homo Sapiens
gaattgaatgaaaagtcagg

SEQ ID NO: 10721 - DNA, 20 bp, Homo Sapiens
aattgaatgaaaagtcagga

SEQ ID NO: 10722 - DNA, 20 bp, Homo Sapiens
attgaatgaaaagtcaggag

SEQ ID NO: 10723 - DNA, 20 bp, Homo Sapiens
ttgaatgaaaagtcaggaga

SEQ ID NO: 10724 - DNA, 20 bp, Homo Sapiens
tgaatgaaaagtcaggagat

SEQ ID NO: 10725 - DNA, 20 bp, Homo Sapiens
gaatgaaaagtcaggagatc

SEQ ID NO: 10726 - DNA, 20 bp, Homo Sapiens
aatgaaaagtcaggagatca

SEQ ID NO: 10727 - DNA, 20 bp, Homo Sapiens
atgaaaagtcaggagatcag

SEQ ID NO: 10728 - DNA, 20 bp, Homo Sapiens
tgaaaagtcaggagatcaga

SEQ ID NO: 10729 - DNA, 20 bp, Homo Sapiens
gaaaagtcaggagatcagaa

SEQ ID NO: 10730 - DNA, 20 bp, Homo Sapiens
aaaagtcaggagatcagaat

SEQ ID NO: 10731 - DNA, 20 bp, Homo Sapiens
aaagtcaggagatcagaatt

SEQ ID NO: 10732 - DNA, 20 bp, Homo Sapiens
aagtcaggagatcagaattt

SEQ ID NO: 10733 - DNA, 20 bp, Homo Sapiens
agtcaggagatcagaatttt

SEQ ID NO: 10734 - DNA, 20 bp, Homo Sapiens
gtcaggagatcagaatttta

SEQ ID NO: 10735 - DNA, 20 bp, Homo Sapiens
tcaggagatcagaattttaa

SEQ ID NO: 10736 - DNA, 20 bp, Homo Sapiens
caggagatcagaattttaaa

SEQ ID NO: 10737 - DNA, 20 bp, Homo Sapiens
aggagatcagaattttaaat

SEQ ID NO: 10738 - DNA, 20 bp, Homo Sapiens
ggagatcagaattttaaatt

SEQ ID NO: 10739 - DNA, 20 bp, Homo Sapiens
gagatcagaattttaaattt

SEQ ID NO: 10740 - DNA, 20 bp, Homo Sapiens
agatcagaattttaaatttg

SEQ ID NO: 10741 - DNA, 20 bp, Homo Sapiens
gatcagaattttaaatttga

SEQ ID NO: 10742 - DNA, 20 bp, Homo Sapiens
atcagaattttaaatttgac

SEQ ID NO: 10743 - DNA, 20 bp, Homo Sapiens
tcagaattttaaatttgact

SEQ ID NO: 10744 - DNA, 20 bp, Homo Sapiens
cagaattttaaatttgactt

SEQ ID NO: 10745 - DNA, 20 bp, Homo Sapiens
agaattttaaatttgactta

SEQ ID NO: 10746 - DNA, 20 bp, Homo Sapiens
gaattttaaatttgacttag

SEQ ID NO: 10747 - DNA, 20 bp, Homo Sapiens
aattttaaatttgacttagc

SEQ ID NO: 10748 - DNA, 20 bp, Homo Sapiens
attttaaatttgacttagcc

SEQ ID NO: 10749 - DNA, 20 bp, Homo Sapiens
ttttaaatttgacttagcca

SEQ ID NO: 10750 - DNA, 20 bp, Homo Sapiens
tttaaatttgacttagccac

SEQ ID NO: 10751 - DNA, 20 bp, Homo Sapiens
ttaaatttgacttagccact

SEQ ID NO: 10752 - DNA, 20 bp, Homo Sapiens
taaatttgacttagccacta

SEQ ID NO: 10753 - DNA, 20 bp, Homo Sapiens
aaatttgacttagccactaa

SEQ ID NO: 10754 - DNA, 20 bp, Homo Sapiens
aatttgacttagccactaac

SEQ ID NO: 10755 - DNA, 20 bp, Homo Sapiens
atttgacttagccactaact

SEQ ID NO: 10756 - DNA, 20 bp, Homo Sapiens
tttgacttagccactaacta

SEQ ID NO: 10757 - DNA, 20 bp, Homo Sapiens
ttgacttagccactaactag

SEQ ID NO: 10758 - DNA, 20 bp, Homo Sapiens
tgacttagccactaactagc

SEQ ID NO: 10759 - DNA, 20 bp, Homo Sapiens
gacttagccactaactagcc

SEQ ID NO: 10760 - DNA, 20 bp, Homo Sapiens
acttagccactaactagcca

SEQ ID NO: 10761 - DNA, 20 bp, Homo Sapiens
cttagccactaactagccat

SEQ ID NO: 10762 - DNA, 20 bp, Homo Sapiens
ttagccactaactagccatg

SEQ ID NO: 10763 - DNA, 20 bp, Homo Sapiens
tagccactaactagccatgt

SEQ ID NO: 10764 - DNA, 20 bp, Homo Sapiens
agccactaactagccatgta

SEQ ID NO: 10765 - DNA, 20 bp, Homo Sapiens
gccactaactagccatgtaa

SEQ ID NO: 10766 - DNA, 20 bp, Homo Sapiens
ccactaactagccatgtaac

SEQ ID NO: 10767 - DNA, 20 bp, Homo Sapiens
cactaactagccatgtaacc

SEQ ID NO: 10768 - DNA, 20 bp, Homo Sapiens
actaactagccatgtaacct

SEQ ID NO: 10769 - DNA, 20 bp, Homo Sapiens
ctaactagccatgtaacctt

SEQ ID NO: 10770 - DNA, 20 bp, Homo Sapiens
taactagccatgtaaccttg

SEQ ID NO: 10771 - DNA, 20 bp, Homo Sapiens
aactagccatgtaaccttgg

SEQ ID NO: 10772 - DNA, 20 bp, Homo Sapiens
actagccatgtaaccttggg

SEQ ID NO: 10773 - DNA, 20 bp, Homo Sapiens
ctagccatgtaaccttggga

SEQ ID NO: 10774 - DNA, 20 bp, Homo Sapiens
tagccatgtaaccttgggaa

SEQ ID NO: 10775 - DNA, 20 bp, Homo Sapiens
agccatgtaaccttgggaaa

SEQ ID NO: 10776 - DNA, 20 bp, Homo Sapiens
gccatgtaaccttgggaaag

SEQ ID NO: 10777 - DNA, 20 bp, Homo Sapiens
ccatgtaaccttgggaaagt

SEQ ID NO: 10778 - DNA, 20 bp, Homo Sapiens
catgtaaccttgggaaagtc

SEQ ID NO: 10779 - DNA, 20 bp, Homo Sapiens
atgtaaccttgggaaagtca

SEQ ID NO: 10780 - DNA, 20 bp, Homo Sapiens
tgtaaccttgggaaagtcat

SEQ ID NO: 10781 - DNA, 20 bp, Homo Sapiens
gtaaccttgggaaagtcatt

SEQ ID NO: 10782 - DNA, 20 bp, Homo Sapiens
taaccttgggaaagtcattt

SEQ ID NO: 10783 - DNA, 20 bp, Homo Sapiens
aaccttgggaaagtcatttc

SEQ ID NO: 10784 - DNA, 20 bp, Homo Sapiens
accttgggaaagtcatttcc

SEQ ID NO: 10785 - DNA, 20 bp, Homo Sapiens
ccttgggaaagtcatttccc

SEQ ID NO: 10786 - DNA, 20 bp, Homo Sapiens
cttgggaaagtcatttccca

SEQ ID NO: 10787 - DNA, 20 bp, Homo Sapiens
ttgggaaagtcatttcccat

SEQ ID NO: 10788 - DNA, 20 bp, Homo Sapiens
tgggaaagtcatttcccatt

SEQ ID NO: 10789 - DNA, 20 bp, Homo Sapiens
gggaaagtcatttcccattt

SEQ ID NO: 10790 - DNA, 20 bp, Homo Sapiens
ggaaagtcatttcccatttc

SEQ ID NO: 10791 - DNA, 20 bp, Homo Sapiens
gaaagtcatttcccatttct

SEQ ID NO: 10792 - DNA, 20 bp, Homo Sapiens
aaagtcatttcccatttctg

SEQ ID NO: 10793 - DNA, 20 bp, Homo Sapiens
aagtcatttcccatttctgg

SEQ ID NO: 10794 - DNA, 20 bp, Homo Sapiens
agtcatttcccatttctggg

SEQ ID NO: 10795 - DNA, 20 bp, Homo Sapiens
gtcatttcccatttctgggt

SEQ ID NO: 10796 - DNA, 20 bp, Homo Sapiens
tcatttcccatttctgggtc

SEQ ID NO: 10797 - DNA, 20 bp, Homo Sapiens
catttcccatttctgggtct

SEQ ID NO: 10798 - DNA, 20 bp, Homo Sapiens
atttcccatttctgggtctt

SEQ ID NO: 10799 - DNA, 20 bp, Homo Sapiens
tttcccatttctgggtcttg

SEQ ID NO: 10800 - DNA, 20 bp, Homo Sapiens
ttcccatttctgggtcttgc

SEQ ID NO: 10801 - DNA, 20 bp, Homo Sapiens
tcccatttctgggtcttgct

SEQ ID NO: 10802 - DNA, 20 bp, Homo Sapiens
cccatttctgggtcttgctt

SEQ ID NO: 10803 - DNA, 20 bp, Homo Sapiens
ccatttctgggtcttgcttt

SEQ ID NO: 10804 - DNA, 20 bp, Homo Sapiens
catttctgggtcttgctttt

SEQ ID NO: 10805 - DNA, 20 bp, Homo Sapiens
atttctgggtcttgcttttc

SEQ ID NO: 10806 - DNA, 20 bp, Homo Sapiens
tttctgggtcttgcttttct

SEQ ID NO: 10807 - DNA, 20 bp, Homo Sapiens
ttctgggtcttgcttttctt

SEQ ID NO: 10808 - DNA, 20 bp, Homo Sapiens
tctgggtcttgcttttcttt

SEQ ID NO: 10809 - DNA, 20 bp, Homo Sapiens
ctgggtcttgcttttctttc

SEQ ID NO: 10810 - DNA, 20 bp, Homo Sapiens
tgggtcttgcttttctttct

SEQ ID NO: 10811 - DNA, 20 bp, Homo Sapiens
gggtcttgcttttctttctg

SEQ ID NO: 10812 - DNA, 20 bp, Homo Sapiens
ggtcttgcttttctttctgt

SEQ ID NO: 10813 - DNA, 20 bp, Homo Sapiens
gtcttgcttttctttctgtt

SEQ ID NO: 10814 - DNA, 20 bp, Homo Sapiens
tcttgcttttctttctgtta

SEQ ID NO: 10815 - DNA, 20 bp, Homo Sapiens
cttgcttttctttctgttaa

SEQ ID NO: 10816 - DNA, 20 bp, Homo Sapiens
ttgcttttctttctgttaaa

SEQ ID NO: 10817 - DNA, 20 bp, Homo Sapiens
tgcttttctttctgttaaat

SEQ ID NO: 10818 - DNA, 20 bp, Homo Sapiens
gcttttctttctgttaaatg

SEQ ID NO: 10819 - DNA, 20 bp, Homo Sapiens
cttttctttctgttaaatga

SEQ ID NO: 10820 - DNA, 20 bp, Homo Sapiens
ttttctttctgttaaatgag

SEQ ID NO: 10821 - DNA, 20 bp, Homo Sapiens
tttctttctgttaaatgaga

SEQ ID NO: 10822 - DNA, 20 bp, Homo Sapiens
ttctttctgttaaatgagag

SEQ ID NO: 10823 - DNA, 20 bp, Homo Sapiens
tctttctgttaaatgagagg

SEQ ID NO: 10824 - DNA, 20 bp, Homo Sapiens
ctttctgttaaatgagagga

SEQ ID NO: 10825 - DNA, 20 bp, Homo Sapiens
tttctgttaaatgagaggaa

SEQ ID NO: 10826 - DNA, 20 bp, Homo Sapiens
ttctgttaaatgagaggaat

SEQ ID NO: 10827 - DNA, 20 bp, Homo Sapiens
tctgttaaatgagaggaatg

SEQ ID NO: 10828 - DNA, 20 bp, Homo Sapiens
ctgttaaatgagaggaatgt

SEQ ID NO: 10829 - DNA, 20 bp, Homo Sapiens
tgttaaatgagaggaatgtt

SEQ ID NO: 10830 - DNA, 20 bp, Homo Sapiens
gttaaatgagaggaatgtta

SEQ ID NO: 10831 - DNA, 20 bp, Homo Sapiens
ttaaatgagaggaatgttaa

SEQ ID NO: 10832 - DNA, 20 bp, Homo Sapiens
taaatgagaggaatgttaaa

SEQ ID NO: 10833 - DNA, 20 bp, Homo Sapiens
aaatgagaggaatgttaaat

SEQ ID NO: 10834 - DNA, 20 bp, Homo Sapiens
aatgagaggaatgttaaata

SEQ ID NO: 10835 - DNA, 20 bp, Homo Sapiens
atgagaggaatgttaaatat

SEQ ID NO: 10836 - DNA, 20 bp, Homo Sapiens
tgagaggaatgttaaatatc

SEQ ID NO: 10837 - DNA, 20 bp, Homo Sapiens
gagaggaatgttaaatatct

SEQ ID NO: 10838 - DNA, 20 bp, Homo Sapiens
agaggaatgttaaatatcta

SEQ ID NO: 10839 - DNA, 20 bp, Homo Sapiens
gaggaatgttaaatatctaa

SEQ ID NO: 10840 - DNA, 20 bp, Homo Sapiens
aggaatgttaaatatctaac

SEQ ID NO: 10841 - DNA, 20 bp, Homo Sapiens
ggaatgttaaatatctaaca

SEQ ID NO: 10842 - DNA, 20 bp, Homo Sapiens
gaatgttaaatatctaacag

SEQ ID NO: 10843 - DNA, 20 bp, Homo Sapiens
aatgttaaatatctaacagt

SEQ ID NO: 10844 - DNA, 20 bp, Homo Sapiens
atgttaaatatctaacagtt

SEQ ID NO: 10845 - DNA, 20 bp, Homo Sapiens
tgttaaatatctaacagttt

SEQ ID NO: 10846 - DNA, 20 bp, Homo Sapiens
gttaaatatctaacagttta

SEQ ID NO: 10847 - DNA, 20 bp, Homo Sapiens
ttaaatatctaacagtttag

SEQ ID NO: 10848 - DNA, 20 bp, Homo Sapiens
taaatatctaacagtttaga

SEQ ID NO: 10849 - DNA, 20 bp, Homo Sapiens
aaatatctaacagtttagaa

SEQ ID NO: 10850 - DNA, 20 bp, Homo Sapiens
aatatctaacagtttagaat

SEQ ID NO: 10851 - DNA, 20 bp, Homo Sapiens
atatctaacagtttagaatc

SEQ ID NO: 10852 - DNA, 20 bp, Homo Sapiens
tatctaacagtttagaatct

SEQ ID NO: 10853 - DNA, 20 bp, Homo Sapiens
atctaacagtttagaatctt

SEQ ID NO: 10854 - DNA, 20 bp, Homo Sapiens
tctaacagtttagaatctta

SEQ ID NO: 10855 - DNA, 20 bp, Homo Sapiens
ctaacagtttagaatcttat

SEQ ID NO: 10856 - DNA, 20 bp, Homo Sapiens
taacagtttagaatcttatg

SEQ ID NO: 10857 - DNA, 20 bp, Homo Sapiens
aacagtttagaatcttatgc

SEQ ID NO: 10858 - DNA, 20 bp, Homo Sapiens
acagtttagaatcttatgct

SEQ ID NO: 10859 - DNA, 20 bp, Homo Sapiens
cagtttagaatcttatgctt

SEQ ID NO: 10860 - DNA, 20 bp, Homo Sapiens
agtttagaatcttatgctta

SEQ ID NO: 10861 - DNA, 20 bp, Homo Sapiens
gtttagaatcttatgcttac

SEQ ID NO: 10862 - DNA, 20 bp, Homo Sapiens
tttagaatcttatgcttaca

SEQ ID NO: 10863 - DNA, 20 bp, Homo Sapiens
ttagaatcttatgcttacag

SEQ ID NO: 10864 - DNA, 20 bp, Homo Sapiens
tagaatcttatgcttacagt

SEQ ID NO: 10865 - DNA, 20 bp, Homo Sapiens
agaatcttatgcttacagtg

SEQ ID NO: 10866 - DNA, 20 bp, Homo Sapiens
gaatcttatgcttacagtgt

SEQ ID NO: 10867 - DNA, 20 bp, Homo Sapiens
aatcttatgcttacagtgtt

SEQ ID NO: 10868 - DNA, 20 bp, Homo Sapiens
atcttatgcttacagtgtta

SEQ ID NO: 10869 - DNA, 20 bp, Homo Sapiens
tcttatgcttacagtgttat

SEQ ID NO: 10870 - DNA, 20 bp, Homo Sapiens
cttatgcttacagtgttatc

SEQ ID NO: 10871 - DNA, 20 bp, Homo Sapiens
ttatgcttacagtgttatct

SEQ ID NO: 10872 - DNA, 20 bp, Homo Sapiens
tatgcttacagtgttatctg

SEQ ID NO: 10873 - DNA, 20 bp, Homo Sapiens
atgcttacagtgttatctgt

SEQ ID NO: 10874 - DNA, 20 bp, Homo Sapiens
tgcttacagtgttatctgtg

SEQ ID NO: 10875 - DNA, 20 bp, Homo Sapiens
gcttacagtgttatctgtga

SEQ ID NO: 10876 - DNA, 20 bp, Homo Sapiens
cttacagtgttatctgtgaa

SEQ ID NO: 10877 - DNA, 20 bp, Homo Sapiens
ttacagtgttatctgtgaat

SEQ ID NO: 10878 - DNA, 20 bp, Homo Sapiens
tacagtgttatctgtgaatg

SEQ ID NO: 10879 - DNA, 20 bp, Homo Sapiens
acagtgttatctgtgaatgc

SEQ ID NO: 10880 - DNA, 20 bp, Homo Sapiens
cagtgttatctgtgaatgca

SEQ ID NO: 10881 - DNA, 20 bp, Homo Sapiens
agtgttatctgtgaatgcac

SEQ ID NO: 10882 - DNA, 20 bp, Homo Sapiens
gtgttatctgtgaatgcaca

SEQ ID NO: 10883 - DNA, 20 bp, Homo Sapiens
tgttatctgtgaatgcacat

SEQ ID NO: 10884 - DNA, 20 bp, Homo Sapiens
gttatctgtgaatgcacata

SEQ ID NO: 10885 - DNA, 20 bp, Homo Sapiens
ttatctgtgaatgcacatat

SEQ ID NO: 10886 - DNA, 20 bp, Homo Sapiens
tatctgtgaatgcacatatt

SEQ ID NO: 10887 - DNA, 20 bp, Homo Sapiens
atctgtgaatgcacatatta

SEQ ID NO: 10888 - DNA, 20 bp, Homo Sapiens
tctgtgaatgcacatattaa

SEQ ID NO: 10889 - DNA, 20 bp, Homo Sapiens
ctgtgaatgcacatattaaa

SEQ ID NO: 10890 - DNA, 20 bp, Homo Sapiens
tgtgaatgcacatattaaat

SEQ ID NO: 10891 - DNA, 20 bp, Homo Sapiens
gtgaatgcacatattaaatg

SEQ ID NO: 10892 - DNA, 20 bp, Homo Sapiens
tgaatgcacatattaaatgt

SEQ ID NO: 10893 - DNA, 20 bp, Homo Sapiens
gaatgcacatattaaatgtc

SEQ ID NO: 10894 - DNA, 20 bp, Homo Sapiens
aatgcacatattaaatgtct

SEQ ID NO: 10895 - DNA, 20 bp, Homo Sapiens
atgcacatattaaatgtcta

SEQ ID NO: 10896 - DNA, 20 bp, Homo Sapiens
tgcacatattaaatgtctat

SEQ ID NO: 10897 - DNA, 20 bp, Homo Sapiens
gcacatattaaatgtctatg

SEQ ID NO: 10898 - DNA, 20 bp, Homo Sapiens
cacatattaaatgtctatgt

SEQ ID NO: 10899 - DNA, 20 bp, Homo Sapiens
acatattaaatgtctatgtt

SEQ ID NO: 10900 - DNA, 20 bp, Homo Sapiens
catattaaatgtctatgttc

SEQ ID NO: 10901 - DNA, 20 bp, Homo Sapiens
atattaaatgtctatgttct

SEQ ID NO: 10902 - DNA, 20 bp, Homo Sapiens
tattaaatgtctatgttctt

SEQ ID NO: 10903 - DNA, 20 bp, Homo Sapiens
attaaatgtctatgttcttg

SEQ ID NO: 10904 - DNA, 20 bp, Homo Sapiens
ttaaatgtctatgttcttgt

SEQ ID NO: 10905 - DNA, 20 bp, Homo Sapiens
taaatgtctatgttcttgtt

SEQ ID NO: 10906 - DNA, 20 bp, Homo Sapiens
aaatgtctatgttcttgttg

SEQ ID NO: 10907 - DNA, 20 bp, Homo Sapiens
aatgtctatgttcttgttgc

SEQ ID NO: 10908 - DNA, 20 bp, Homo Sapiens
atgtctatgttcttgttgct

SEQ ID NO: 10909 - DNA, 20 bp, Homo Sapiens
tgtctatgttcttgttgcta

SEQ ID NO: 10910 - DNA, 20 bp, Homo Sapiens
gtctatgttcttgttgctat

SEQ ID NO: 10911 - DNA, 20 bp, Homo Sapiens
tctatgttcttgttgctatg

SEQ ID NO: 10912 - DNA, 20 bp, Homo Sapiens
ctatgttcttgttgctatga

SEQ ID NO: 10913 - DNA, 20 bp, Homo Sapiens
tatgttcttgttgctatgag

SEQ ID NO: 10914 - DNA, 20 bp, Homo Sapiens
atgttcttgttgctatgagt

SEQ ID NO: 10915 - DNA, 20 bp, Homo Sapiens
tgttcttgttgctatgagtc

SEQ ID NO: 10916 - DNA, 20 bp, Homo Sapiens
gttcttgttgctatgagtca

SEQ ID NO: 10917 - DNA, 20 bp, Homo Sapiens
ttcttgttgctatgagtcaa

SEQ ID NO: 10918 - DNA, 20 bp, Homo Sapiens
tcttgttgctatgagtcaag

SEQ ID NO: 10919 - DNA, 20 bp, Homo Sapiens
cttgttgctatgagtcaagg

SEQ ID NO: 10920 - DNA, 20 bp, Homo Sapiens
ttgttgctatgagtcaagga

SEQ ID NO: 10921 - DNA, 20 bp, Homo Sapiens
tgttgctatgagtcaaggag

SEQ ID NO: 10922 - DNA, 20 bp, Homo Sapiens
gttgctatgagtcaaggagt

SEQ ID NO: 10923 - DNA, 20 bp, Homo Sapiens
ttgctatgagtcaaggagtg

SEQ ID NO: 10924 - DNA, 20 bp, Homo Sapiens
tgctatgagtcaaggagtgt

SEQ ID NO: 10925 - DNA, 20 bp, Homo Sapiens
gctatgagtcaaggagtgta

SEQ ID NO: 10926 - DNA, 20 bp, Homo Sapiens
ctatgagtcaaggagtgtaa

SEQ ID NO: 10927 - DNA, 20 bp, Homo Sapiens
tatgagtcaaggagtgtaac

SEQ ID NO: 10928 - DNA, 20 bp, Homo Sapiens
atgagtcaaggagtgtaacc

SEQ ID NO: 10929 - DNA, 20 bp, Homo Sapiens
tgagtcaaggagtgtaacct

SEQ ID NO: 10930 - DNA, 20 bp, Homo Sapiens
gagtcaaggagtgtaacctt

SEQ ID NO: 10931 - DNA, 20 bp, Homo Sapiens
agtcaaggagtgtaaccttc

SEQ ID NO: 10932 - DNA, 20 bp, Homo Sapiens
gtcaaggagtgtaaccttct

SEQ ID NO: 10933 - DNA, 20 bp, Homo Sapiens
tcaaggagtgtaaccttctc

SEQ ID NO: 10934 - DNA, 20 bp, Homo Sapiens
caaggagtgtaaccttctcc

SEQ ID NO: 10935 - DNA, 20 bp, Homo Sapiens
aaggagtgtaaccttctcct

SEQ ID NO: 10936 - DNA, 20 bp, Homo Sapiens
aggagtgtaaccttctcctt

SEQ ID NO: 10937 - DNA, 20 bp, Homo Sapiens
ggagtgtaaccttctccttt

SEQ ID NO: 10938 - DNA, 20 bp, Homo Sapiens
gagtgtaaccttctccttta

SEQ ID NO: 10939 - DNA, 20 bp, Homo Sapiens
agtgtaaccttctcctttac

SEQ ID NO: 10940 - DNA, 20 bp, Homo Sapiens
gtgtaaccttctcctttact

SEQ ID NO: 10941 - DNA, 20 bp, Homo Sapiens
tgtaaccttctcctttacta

SEQ ID NO: 10942 - DNA, 20 bp, Homo Sapiens
gtaaccttctcctttactat

SEQ ID NO: 10943 - DNA, 20 bp, Homo Sapiens
taaccttctcctttactatg

SEQ ID NO: 10944 - DNA, 20 bp, Homo Sapiens
aaccttctcctttactatgt

SEQ ID NO: 10945 - DNA, 20 bp, Homo Sapiens
accttctcctttactatgtt

SEQ ID NO: 10946 - DNA, 20 bp, Homo Sapiens
ccttctcctttactatgttg

SEQ ID NO: 10947 - DNA, 20 bp, Homo Sapiens
cttctcctttactatgttga

SEQ ID NO: 10948 - DNA, 20 bp, Homo Sapiens
ttctcctttactatgttgaa

SEQ ID NO: 10949 - DNA, 20 bp, Homo Sapiens
tctcctttactatgttgaat

SEQ ID NO: 10950 - DNA, 20 bp, Homo Sapiens
ctcctttactatgttgaatg

SEQ ID NO: 10951 - DNA, 20 bp, Homo Sapiens
tcctttactatgttgaatgt

SEQ ID NO: 10952 - DNA, 20 bp, Homo Sapiens
cctttactatgttgaatgta

SEQ ID NO: 10953 - DNA, 20 bp, Homo Sapiens
ctttactatgttgaatgtat

SEQ ID NO: 10954 - DNA, 20 bp, Homo Sapiens
tttactatgttgaatgtatt

SEQ ID NO: 10955 - DNA, 20 bp, Homo Sapiens
ttactatgttgaatgtattt

SEQ ID NO: 10956 - DNA, 20 bp, Homo Sapiens
tactatgttgaatgtatttt

SEQ ID NO: 10957 - DNA, 20 bp, Homo Sapiens
actatgttgaatgtattttt

SEQ ID NO: 10958 - DNA, 20 bp, Homo Sapiens
ctatgttgaatgtatttttt

SEQ ID NO: 10959 - DNA, 20 bp, Homo Sapiens
tatgttgaatgtattttttt

SEQ ID NO: 10960 - DNA, 20 bp, Homo Sapiens
atgttgaatgtatttttttc

SEQ ID NO: 10961 - DNA, 20 bp, Homo Sapiens
tgttgaatgtatttttttct

SEQ ID NO: 10962 - DNA, 20 bp, Homo Sapiens
gttgaatgtatttttttctg

SEQ ID NO: 10963 - DNA, 20 bp, Homo Sapiens
ttgaatgtatttttttctgg

SEQ ID NO: 10964 - DNA, 20 bp, Homo Sapiens
tgaatgtatttttttctgga

SEQ ID NO: 10965 - DNA, 20 bp, Homo Sapiens
gaatgtatttttttctggac

SEQ ID NO: 10966 - DNA, 20 bp, Homo Sapiens
aatgtatttttttctggaca

SEQ ID NO: 10967 - DNA, 20 bp, Homo Sapiens
atgtatttttttctggacaa

SEQ ID NO: 10968 - DNA, 20 bp, Homo Sapiens
tgtatttttttctggacaag

SEQ ID NO: 10969 - DNA, 20 bp, Homo Sapiens
gtatttttttctggacaagc

SEQ ID NO: 10970 - DNA, 20 bp, Homo Sapiens
tatttttttctggacaagct

SEQ ID NO: 10971 - DNA, 20 bp, Homo Sapiens
atttttttctggacaagctt

SEQ ID NO: 10972 - DNA, 20 bp, Homo Sapiens
tttttttctggacaagctta

SEQ ID NO: 10973 - DNA, 20 bp, Homo Sapiens
ttttttctggacaagcttac

SEQ ID NO: 10974 - DNA, 20 bp, Homo Sapiens
tttttctggacaagcttaca

SEQ ID NO: 10975 - DNA, 20 bp, Homo Sapiens
ttttctggacaagcttacat

SEQ ID NO: 10976 - DNA, 20 bp, Homo Sapiens
tttctggacaagcttacatc

SEQ ID NO: 10977 - DNA, 20 bp, Homo Sapiens
ttctggacaagcttacatct

SEQ ID NO: 10978 - DNA, 20 bp, Homo Sapiens
tctggacaagcttacatctt

SEQ ID NO: 10979 - DNA, 20 bp, Homo Sapiens
ctggacaagcttacatcttc

SEQ ID NO: 10980 - DNA, 20 bp, Homo Sapiens
tggacaagcttacatcttcc

SEQ ID NO: 10981 - DNA, 20 bp, Homo Sapiens
ggacaagcttacatcttcct

SEQ ID NO: 10982 - DNA, 20 bp, Homo Sapiens
gacaagcttacatcttcctc

SEQ ID NO: 10983 - DNA, 20 bp, Homo Sapiens
acaagcttacatcttcctca

SEQ ID NO: 10984 - DNA, 20 bp, Homo Sapiens
caagcttacatcttcctcag

SEQ ID NO: 10985 - DNA, 20 bp, Homo Sapiens
aagcttacatcttcctcagc

SEQ ID NO: 10986 - DNA, 20 bp, Homo Sapiens
agcttacatcttcctcagcc

SEQ ID NO: 10987 - DNA, 20 bp, Homo Sapiens
gcttacatcttcctcagcca

SEQ ID NO: 10988 - DNA, 20 bp, Homo Sapiens
cttacatcttcctcagccat

SEQ ID NO: 10989 - DNA, 20 bp, Homo Sapiens
ttacatcttcctcagccatc

SEQ ID NO: 10990 - DNA, 20 bp, Homo Sapiens
tacatcttcctcagccatct

SEQ ID NO: 10991 - DNA, 20 bp, Homo Sapiens
acatcttcctcagccatctt

SEQ ID NO: 10992 - DNA, 20 bp, Homo Sapiens
catcttcctcagccatcttt

SEQ ID NO: 10993 - DNA, 20 bp, Homo Sapiens
atcttcctcagccatctttg

SEQ ID NO: 10994 - DNA, 20 bp, Homo Sapiens
tcttcctcagccatctttgt

SEQ ID NO: 10995 - DNA, 20 bp, Homo Sapiens
cttcctcagccatctttgtg

SEQ ID NO: 10996 - DNA, 20 bp, Homo Sapiens
ttcctcagccatctttgtga

SEQ ID NO: 10997 - DNA, 20 bp, Homo Sapiens
tcctcagccatctttgtgag

SEQ ID NO: 10998 - DNA, 20 bp, Homo Sapiens
cctcagccatctttgtgagt

SEQ ID NO: 10999 - DNA, 20 bp, Homo Sapiens
ctcagccatctttgtgagtc

SEQ ID NO: 11000 - DNA, 20 bp, Homo Sapiens
tcagccatctttgtgagtcc

SEQ ID NO: 11001 - DNA, 20 bp, Homo Sapiens
cagccatctttgtgagtcct

SEQ ID NO: 11002 - DNA, 20 bp, Homo Sapiens
agccatctttgtgagtcctt

SEQ ID NO: 11003 - DNA, 20 bp, Homo Sapiens
gccatctttgtgagtccttc

SEQ ID NO: 11004 - DNA, 20 bp, Homo Sapiens
ccatctttgtgagtccttca

SEQ ID NO: 11005 - DNA, 20 bp, Homo Sapiens
catctttgtgagtccttcaa

SEQ ID NO: 11006 - DNA, 20 bp, Homo Sapiens
atctttgtgagtccttcaag

SEQ ID NO: 11007 - DNA, 20 bp, Homo Sapiens
tctttgtgagtccttcaaga

SEQ ID NO: 11008 - DNA, 20 bp, Homo Sapiens
ctttgtgagtccttcaagag

SEQ ID NO: 11009 - DNA, 20 bp, Homo Sapiens
tttgtgagtccttcaagagc

SEQ ID NO: 11010 - DNA, 20 bp, Homo Sapiens
ttgtgagtccttcaagagca

SEQ ID NO: 11011 - DNA, 20 bp, Homo Sapiens
tgtgagtccttcaagagcag

SEQ ID NO: 11012 - DNA, 20 bp, Homo Sapiens
gtgagtccttcaagagcagt

SEQ ID NO: 11013 - DNA, 20 bp, Homo Sapiens
tgagtccttcaagagcagtt

SEQ ID NO: 11014 - DNA, 20 bp, Homo Sapiens
gagtccttcaagagcagtta

SEQ ID NO: 11015 - DNA, 20 bp, Homo Sapiens
agtccttcaagagcagttat

SEQ ID NO: 11016 - DNA, 20 bp, Homo Sapiens
gtccttcaagagcagttatc

SEQ ID NO: 11017 - DNA, 20 bp, Homo Sapiens
tccttcaagagcagttatca

SEQ ID NO: 11018 - DNA, 20 bp, Homo Sapiens
ccttcaagagcagttatcaa

SEQ ID NO: 11019 - DNA, 20 bp, Homo Sapiens
cttcaagagcagttatcaat

SEQ ID NO: 11020 - DNA, 20 bp, Homo Sapiens
ttcaagagcagttatcaatt

SEQ ID NO: 11021 - DNA, 20 bp, Homo Sapiens
tcaagagcagttatcaattg

SEQ ID NO: 11022 - DNA, 20 bp, Homo Sapiens
caagagcagttatcaattgt

SEQ ID NO: 11023 - DNA, 20 bp, Homo Sapiens
aagagcagttatcaattgtt

SEQ ID NO: 11024 - DNA, 20 bp, Homo Sapiens
agagcagttatcaattgtta

SEQ ID NO: 11025 - DNA, 20 bp, Homo Sapiens
gagcagttatcaattgttag

SEQ ID NO: 11026 - DNA, 20 bp, Homo Sapiens
agcagttatcaattgttagt

SEQ ID NO: 11027 - DNA, 20 bp, Homo Sapiens
gcagttatcaattgttagtt

SEQ ID NO: 11028 - DNA, 20 bp, Homo Sapiens
cagttatcaattgttagtta

SEQ ID NO: 11029 - DNA, 20 bp, Homo Sapiens
agttatcaattgttagttag

SEQ ID NO: 11030 - DNA, 20 bp, Homo Sapiens
gttatcaattgttagttaga

SEQ ID NO: 11031 - DNA, 20 bp, Homo Sapiens
ttatcaattgttagttagat

SEQ ID NO: 11032 - DNA, 20 bp, Homo Sapiens
tatcaattgttagttagata

SEQ ID NO: 11033 - DNA, 20 bp, Homo Sapiens
atcaattgttagttagatat

SEQ ID NO: 11034 - DNA, 20 bp, Homo Sapiens
tcaattgttagttagatatt

SEQ ID NO: 11035 - DNA, 20 bp, Homo Sapiens
caattgttagttagatattt

SEQ ID NO: 11036 - DNA, 20 bp, Homo Sapiens
aattgttagttagatatttt

SEQ ID NO: 11037 - DNA, 20 bp, Homo Sapiens
attgttagttagatattttc

SEQ ID NO: 11038 - DNA, 20 bp, Homo Sapiens
ttgttagttagatattttct

SEQ ID NO: 11039 - DNA, 20 bp, Homo Sapiens
tgttagttagatattttcta

SEQ ID NO: 11040 - DNA, 20 bp, Homo Sapiens
gttagttagatattttctat

SEQ ID NO: 11041 - DNA, 20 bp, Homo Sapiens
ttagttagatattttctatt

SEQ ID NO: 11042 - DNA, 20 bp, Homo Sapiens
tagttagatattttctattt

SEQ ID NO: 11043 - DNA, 20 bp, Homo Sapiens
agttagatattttctattta

SEQ ID NO: 11044 - DNA, 20 bp, Homo Sapiens
gttagatattttctatttag

SEQ ID NO: 11045 - DNA, 20 bp, Homo Sapiens
ttagatattttctatttaga

SEQ ID NO: 11046 - DNA, 20 bp, Homo Sapiens
tagatattttctatttagag

SEQ ID NO: 11047 - DNA, 20 bp, Homo Sapiens
agatattttctatttagaga

SEQ ID NO: 11048 - DNA, 20 bp, Homo Sapiens
gatattttctatttagagaa

SEQ ID NO: 11049 - DNA, 20 bp, Homo Sapiens
atattttctatttagagaat

SEQ ID NO: 11050 - DNA, 20 bp, Homo Sapiens
tattttctatttagagaatg

SEQ ID NO: 11051 - DNA, 20 bp, Homo Sapiens
attttctatttagagaatgc

SEQ ID NO: 11052 - DNA, 20 bp, Homo Sapiens
ttttctatttagagaatgct

SEQ ID NO: 11053 - DNA, 20 bp, Homo Sapiens
tttctatttagagaatgctt

SEQ ID NO: 11054 - DNA, 20 bp, Homo Sapiens
ttctatttagagaatgctta

SEQ ID NO: 11055 - DNA, 20 bp, Homo Sapiens
tctatttagagaatgcttaa

SEQ ID NO: 11056 - DNA, 20 bp, Homo Sapiens
ctatttagagaatgcttaag

SEQ ID NO: 11057 - DNA, 20 bp, Homo Sapiens
tatttagagaatgcttaagg

SEQ ID NO: 11058 - DNA, 20 bp, Homo Sapiens
atttagagaatgcttaaggg

SEQ ID NO: 11059 - DNA, 20 bp, Homo Sapiens
tttagagaatgcttaaggga

SEQ ID NO: 11060 - DNA, 20 bp, Homo Sapiens
ttagagaatgcttaagggat

SEQ ID NO: 11061 - DNA, 20 bp, Homo Sapiens
tagagaatgcttaagggatt

SEQ ID NO: 11062 - DNA, 20 bp, Homo Sapiens
agagaatgcttaagggattc

SEQ ID NO: 11063 - DNA, 20 bp, Homo Sapiens
gagaatgcttaagggattcc

SEQ ID NO: 11064 - DNA, 20 bp, Homo Sapiens
agaatgcttaagggattcca

SEQ ID NO: 11065 - DNA, 20 bp, Homo Sapiens
gaatgcttaagggattccaa

SEQ ID NO: 11066 - DNA, 20 bp, Homo Sapiens
aatgcttaagggattccaat

SEQ ID NO: 11067 - DNA, 20 bp, Homo Sapiens
atgcttaagggattccaatc

SEQ ID NO: 11068 - DNA, 20 bp, Homo Sapiens
tgcttaagggattccaatcc

SEQ ID NO: 11069 - DNA, 20 bp, Homo Sapiens
gcttaagggattccaatccc

SEQ ID NO: 11070 - DNA, 20 bp, Homo Sapiens
cttaagggattccaatcccg

SEQ ID NO: 11071 - DNA, 20 bp, Homo Sapiens
ttaagggattccaatcccga

SEQ ID NO: 11072 - DNA, 20 bp, Homo Sapiens
taagggattccaatcccgat

SEQ ID NO: 11073 - DNA, 20 bp, Homo Sapiens
aagggattccaatcccgatc

SEQ ID NO: 11074 - DNA, 20 bp, Homo Sapiens
agggattccaatcccgatcc

SEQ ID NO: 11075 - DNA, 20 bp, Homo Sapiens
gggattccaatcccgatcca

SEQ ID NO: 11076 - DNA, 20 bp, Homo Sapiens
ggattccaatcccgatccaa

SEQ ID NO: 11077 - DNA, 20 bp, Homo Sapiens
gattccaatcccgatccaaa

SEQ ID NO: 11078 - DNA, 20 bp, Homo Sapiens
attccaatcccgatccaaat

SEQ ID NO: 11079 - DNA, 20 bp, Homo Sapiens
ttccaatcccgatccaaatc

SEQ ID NO: 11080 - DNA, 20 bp, Homo Sapiens
tccaatcccgatccaaatca

SEQ ID NO: 11081 - DNA, 20 bp, Homo Sapiens
ccaatcccgatccaaatcat

SEQ ID NO: 11082 - DNA, 20 bp, Homo Sapiens
caatcccgatccaaatcata

SEQ ID NO: 11083 - DNA, 20 bp, Homo Sapiens
aatcccgatccaaatcataa

SEQ ID NO: 11084 - DNA, 20 bp, Homo Sapiens
atcccgatccaaatcataat

SEQ ID NO: 11085 - DNA, 20 bp, Homo Sapiens
tcccgatccaaatcataatt

SEQ ID NO: 11086 - DNA, 20 bp, Homo Sapiens
cccgatccaaatcataattt

SEQ ID NO: 11087 - DNA, 20 bp, Homo Sapiens
ccgatccaaatcataatttg

SEQ ID NO: 11088 - DNA, 20 bp, Homo Sapiens
cgatccaaatcataatttgt

SEQ ID NO: 11089 - DNA, 20 bp, Homo Sapiens
gatccaaatcataatttgtt

SEQ ID NO: 11090 - DNA, 20 bp, Homo Sapiens
atccaaatcataatttgttc

SEQ ID NO: 11091 - DNA, 20 bp, Homo Sapiens
tccaaatcataatttgttct

SEQ ID NO: 11092 - DNA, 20 bp, Homo Sapiens
ccaaatcataatttgttctt

SEQ ID NO: 11093 - DNA, 20 bp, Homo Sapiens
caaatcataatttgttctta

SEQ ID NO: 11094 - DNA, 20 bp, Homo Sapiens
aaatcataatttgttcttaa

SEQ ID NO: 11095 - DNA, 20 bp, Homo Sapiens
aatcataatttgttcttaag

SEQ ID NO: 11096 - DNA, 20 bp, Homo Sapiens
atcataatttgttcttaagt

SEQ ID NO: 11097 - DNA, 20 bp, Homo Sapiens
tcataatttgttcttaagta

SEQ ID NO: 11098 - DNA, 20 bp, Homo Sapiens
cataatttgttcttaagtat

SEQ ID NO: 11099 - DNA, 20 bp, Homo Sapiens
ataatttgttcttaagtata

SEQ ID NO: 11100 - DNA, 20 bp, Homo Sapiens
taatttgttcttaagtatac

SEQ ID NO: 11101 - DNA, 20 bp, Homo Sapiens
aatttgttcttaagtatact

SEQ ID NO: 11102 - DNA, 20 bp, Homo Sapiens
atttgttcttaagtatactg

SEQ ID NO: 11103 - DNA, 20 bp, Homo Sapiens
tttgttcttaagtatactgg

SEQ ID NO: 11104 - DNA, 20 bp, Homo Sapiens
ttgttcttaagtatactggg

SEQ ID NO: 11105 - DNA, 20 bp, Homo Sapiens
tgttcttaagtatactgggc

SEQ ID NO: 11106 - DNA, 20 bp, Homo Sapiens
gttcttaagtatactgggca

SEQ ID NO: 11107 - DNA, 20 bp, Homo Sapiens
ttcttaagtatactgggcag

SEQ ID NO: 11108 - DNA, 20 bp, Homo Sapiens
tcttaagtatactgggcagg

SEQ ID NO: 11109 - DNA, 20 bp, Homo Sapiens
cttaagtatactgggcaggt

SEQ ID NO: 11110 - DNA, 20 bp, Homo Sapiens
ttaagtatactgggcaggtc

SEQ ID NO: 11111 - DNA, 20 bp, Homo Sapiens
taagtatactgggcaggtcc

SEQ ID NO: 11112 - DNA, 20 bp, Homo Sapiens
aagtatactgggcaggtccc

SEQ ID NO: 11113 - DNA, 20 bp, Homo Sapiens
agtatactgggcaggtcccc

SEQ ID NO: 11114 - DNA, 20 bp, Homo Sapiens
gtatactgggcaggtcccct

SEQ ID NO: 11115 - DNA, 20 bp, Homo Sapiens
tatactgggcaggtccccta

SEQ ID NO: 11116 - DNA, 20 bp, Homo Sapiens
atactgggcaggtcccctat

SEQ ID NO: 11117 - DNA, 20 bp, Homo Sapiens
tactgggcaggtcccctatt

SEQ ID NO: 11118 - DNA, 20 bp, Homo Sapiens
actgggcaggtcccctattt

SEQ ID NO: 11119 - DNA, 20 bp, Homo Sapiens
ctgggcaggtcccctatttt

SEQ ID NO: 11120 - DNA, 20 bp, Homo Sapiens
tgggcaggtcccctatttta

SEQ ID NO: 11121 - DNA, 20 bp, Homo Sapiens
gggcaggtcccctattttaa

SEQ ID NO: 11122 - DNA, 20 bp, Homo Sapiens
ggcaggtcccctattttaag

SEQ ID NO: 11123 - DNA, 20 bp, Homo Sapiens
gcaggtcccctattttaagt

SEQ ID NO: 11124 - DNA, 20 bp, Homo Sapiens
caggtcccctattttaagtc

SEQ ID NO: 11125 - DNA, 20 bp, Homo Sapiens
aggtcccctattttaagtca

SEQ ID NO: 11126 - DNA, 20 bp, Homo Sapiens
ggtcccctattttaagtcat

SEQ ID NO: 11127 - DNA, 20 bp, Homo Sapiens
gtcccctattttaagtcata

SEQ ID NO: 11128 - DNA, 20 bp, Homo Sapiens
tcccctattttaagtcataa

SEQ ID NO: 11129 - DNA, 20 bp, Homo Sapiens
cccctattttaagtcataat

SEQ ID NO: 11130 - DNA, 20 bp, Homo Sapiens
ccctattttaagtcataatt

SEQ ID NO: 11131 - DNA, 20 bp, Homo Sapiens
cctattttaagtcataattt

SEQ ID NO: 11132 - DNA, 20 bp, Homo Sapiens
ctattttaagtcataatttt

SEQ ID NO: 11133 - DNA, 20 bp, Homo Sapiens
tattttaagtcataattttg

SEQ ID NO: 11134 - DNA, 20 bp, Homo Sapiens
attttaagtcataattttgt

SEQ ID NO: 11135 - DNA, 20 bp, Homo Sapiens
ttttaagtcataattttgta

SEQ ID NO: 11136 - DNA, 20 bp, Homo Sapiens
tttaagtcataattttgtat

SEQ ID NO: 11137 - DNA, 20 bp, Homo Sapiens
ttaagtcataattttgtatt

SEQ ID NO: 11138 - DNA, 20 bp, Homo Sapiens
taagtcataattttgtattt

SEQ ID NO: 11139 - DNA, 20 bp, Homo Sapiens
aagtcataattttgtattta

SEQ ID NO: 11140 - DNA, 20 bp, Homo Sapiens
agtcataattttgtatttag

SEQ ID NO: 11141 - DNA, 20 bp, Homo Sapiens
gtcataattttgtatttagt

SEQ ID NO: 11142 - DNA, 20 bp, Homo Sapiens
tcataattttgtatttagtg

SEQ ID NO: 11143 - DNA, 20 bp, Homo Sapiens
cataattttgtatttagtgc

SEQ ID NO: 11144 - DNA, 20 bp, Homo Sapiens
ataattttgtatttagtgct

SEQ ID NO: 11145 - DNA, 20 bp, Homo Sapiens
taattttgtatttagtgctt

SEQ ID NO: 11146 - DNA, 20 bp, Homo Sapiens
aattttgtatttagtgcttt

SEQ ID NO: 11147 - DNA, 20 bp, Homo Sapiens
attttgtatttagtgctttc

SEQ ID NO: 11148 - DNA, 20 bp, Homo Sapiens
ttttgtatttagtgctttcc

SEQ ID NO: 11149 - DNA, 20 bp, Homo Sapiens
tttgtatttagtgctttcct

SEQ ID NO: 11150 - DNA, 20 bp, Homo Sapiens
ttgtatttagtgctttcctg

SEQ ID NO: 11151 - DNA, 20 bp, Homo Sapiens
tgtatttagtgctttcctgg

SEQ ID NO: 11152 - DNA, 20 bp, Homo Sapiens
gtatttagtgctttcctggc

SEQ ID NO: 11153 - DNA, 20 bp, Homo Sapiens
tatttagtgctttcctggct

SEQ ID NO: 11154 - DNA, 20 bp, Homo Sapiens
atttagtgctttcctggctc

SEQ ID NO: 11155 - DNA, 20 bp, Homo Sapiens
tttagtgctttcctggctct

SEQ ID NO: 11156 - DNA, 20 bp, Homo Sapiens
ttagtgctttcctggctctc

SEQ ID NO: 11157 - DNA, 20 bp, Homo Sapiens
tagtgctttcctggctctca

SEQ ID NO: 11158 - DNA, 20 bp, Homo Sapiens
agtgctttcctggctctcag

SEQ ID NO: 11159 - DNA, 20 bp, Homo Sapiens
gtgctttcctggctctcaga

SEQ ID NO: 11160 - DNA, 20 bp, Homo Sapiens
tgctttcctggctctcagag

SEQ ID NO: 11161 - DNA, 20 bp, Homo Sapiens
gctttcctggctctcagaga

SEQ ID NO: 11162 - DNA, 20 bp, Homo Sapiens
ctttcctggctctcagagag

SEQ ID NO: 11163 - DNA, 20 bp, Homo Sapiens
tttcctggctctcagagagt

SEQ ID NO: 11164 - DNA, 20 bp, Homo Sapiens
ttcctggctctcagagagta

SEQ ID NO: 11165 - DNA, 20 bp, Homo Sapiens
tcctggctctcagagagtat

SEQ ID NO: 11166 - DNA, 20 bp, Homo Sapiens
cctggctctcagagagtatt

SEQ ID NO: 11167 - DNA, 20 bp, Homo Sapiens
ctggctctcagagagtatta

SEQ ID NO: 11168 - DNA, 20 bp, Homo Sapiens
tggctctcagagagtattaa

SEQ ID NO: 11169 - DNA, 20 bp, Homo Sapiens
ggctctcagagagtattaat

SEQ ID NO: 11170 - DNA, 20 bp, Homo Sapiens
gctctcagagagtattaata

SEQ ID NO: 11171 - DNA, 20 bp, Homo Sapiens
ctctcagagagtattaatat

SEQ ID NO: 11172 - DNA, 20 bp, Homo Sapiens
tctcagagagtattaatatt

SEQ ID NO: 11173 - DNA, 20 bp, Homo Sapiens
ctcagagagtattaatattg

SEQ ID NO: 11174 - DNA, 20 bp, Homo Sapiens
tcagagagtattaatattga

SEQ ID NO: 11175 - DNA, 20 bp, Homo Sapiens
cagagagtattaatattgat

SEQ ID NO: 11176 - DNA, 20 bp, Homo Sapiens
agagagtattaatattgata

SEQ ID NO: 11177 - DNA, 20 bp, Homo Sapiens
gagagtattaatattgatat

SEQ ID NO: 11178 - DNA, 20 bp, Homo Sapiens
agagtattaatattgatatt

SEQ ID NO: 11179 - DNA, 20 bp, Homo Sapiens
gagtattaatattgatatta

SEQ ID NO: 11180 - DNA, 20 bp, Homo Sapiens
agtattaatattgatattaa

SEQ ID NO: 11181 - DNA, 20 bp, Homo Sapiens
gtattaatattgatattaat

SEQ ID NO: 11182 - DNA, 20 bp, Homo Sapiens
tattaatattgatattaata

SEQ ID NO: 11183 - DNA, 20 bp, Homo Sapiens
attaatattgatattaataa

SEQ ID NO: 11184 - DNA, 20 bp, Homo Sapiens
ttaatattgatattaataat

SEQ ID NO: 11185 - DNA, 20 bp, Homo Sapiens
taatattgatattaataata

SEQ ID NO: 11186 - DNA, 20 bp, Homo Sapiens
aatattgatattaataatat

SEQ ID NO: 11187 - DNA, 20 bp, Homo Sapiens
atattgatattaataatata

SEQ ID NO: 11188 - DNA, 20 bp, Homo Sapiens
tattgatattaataatatag

SEQ ID NO: 11189 - DNA, 20 bp, Homo Sapiens
attgatattaataatatagt

SEQ ID NO: 11190 - DNA, 20 bp, Homo Sapiens
ttgatattaataatatagtt

SEQ ID NO: 11191 - DNA, 20 bp, Homo Sapiens
tgatattaataatatagtta

SEQ ID NO: 11192 - DNA, 20 bp, Homo Sapiens
gatattaataatatagttaa

SEQ ID NO: 11193 - DNA, 20 bp, Homo Sapiens
atattaataatatagttaat

SEQ ID NO: 11194 - DNA, 20 bp, Homo Sapiens
tattaataatatagttaata

SEQ ID NO: 11195 - DNA, 20 bp, Homo Sapiens
attaataatatagttaatag

SEQ ID NO: 11196 - DNA, 20 bp, Homo Sapiens
ttaataatatagttaatagt

SEQ ID NO: 11197 - DNA, 20 bp, Homo Sapiens
taataatatagttaatagta

SEQ ID NO: 11198 - DNA, 20 bp, Homo Sapiens
aataatatagttaatagtaa

SEQ ID NO: 11199 - DNA, 20 bp, Homo Sapiens
ataatatagttaatagtaat

SEQ ID NO: 11200 - DNA, 20 bp, Homo Sapiens
taatatagttaatagtaata

SEQ ID NO: 11201 - DNA, 20 bp, Homo Sapiens
aatatagttaatagtaatat

SEQ ID NO: 11202 - DNA, 20 bp, Homo Sapiens
atatagttaatagtaatatt

SEQ ID NO: 11203 - DNA, 20 bp, Homo Sapiens
tatagttaatagtaatattg

SEQ ID NO: 11204 - DNA, 20 bp, Homo Sapiens
atagttaatagtaatattgc

SEQ ID NO: 11205 - DNA, 20 bp, Homo Sapiens
tagttaatagtaatattgct

SEQ ID NO: 11206 - DNA, 20 bp, Homo Sapiens
agttaatagtaatattgcta

SEQ ID NO: 11207 - DNA, 20 bp, Homo Sapiens
gttaatagtaatattgctat

SEQ ID NO: 11208 - DNA, 20 bp, Homo Sapiens
ttaatagtaatattgctatt

SEQ ID NO: 11209 - DNA, 20 bp, Homo Sapiens
taatagtaatattgctattt

SEQ ID NO: 11210 - DNA, 20 bp, Homo Sapiens
aatagtaatattgctattta

SEQ ID NO: 11211 - DNA, 20 bp, Homo Sapiens
atagtaatattgctatttac

SEQ ID NO: 11212 - DNA, 20 bp, Homo Sapiens
tagtaatattgctatttaca

SEQ ID NO: 11213 - DNA, 20 bp, Homo Sapiens
agtaatattgctatttacat

SEQ ID NO: 11214 - DNA, 20 bp, Homo Sapiens
gtaatattgctatttacatg

SEQ ID NO: 11215 - DNA, 20 bp, Homo Sapiens
taatattgctatttacatgg

SEQ ID NO: 11216 - DNA, 20 bp, Homo Sapiens
aatattgctatttacatgga

SEQ ID NO: 11217 - DNA, 20 bp, Homo Sapiens
atattgctatttacatggaa

SEQ ID NO: 11218 - DNA, 20 bp, Homo Sapiens
tattgctatttacatggaaa

SEQ ID NO: 11219 - DNA, 20 bp, Homo Sapiens
attgctatttacatggaaac

SEQ ID NO: 11220 - DNA, 20 bp, Homo Sapiens
ttgctatttacatggaaaca

SEQ ID NO: 11221 - DNA, 20 bp, Homo Sapiens
tgctatttacatggaaacaa

SEQ ID NO: 11222 - DNA, 20 bp, Homo Sapiens
gctatttacatggaaacaaa

SEQ ID NO: 11223 - DNA, 20 bp, Homo Sapiens
ctatttacatggaaacaaat

SEQ ID NO: 11224 - DNA, 20 bp, Homo Sapiens
tatttacatggaaacaaata

SEQ ID NO: 11225 - DNA, 20 bp, Homo Sapiens
atttacatggaaacaaataa

SEQ ID NO: 11226 - DNA, 20 bp, Homo Sapiens
tttacatggaaacaaataaa

SEQ ID NO: 11227 - DNA, 20 bp, Homo Sapiens
ttacatggaaacaaataaaa

SEQ ID NO: 11228 - DNA, 20 bp, Homo Sapiens
tacatggaaacaaataaaag

SEQ ID NO: 11229 - DNA, 20 bp, Homo Sapiens
acatggaaacaaataaaaga

SEQ ID NO: 11230 - DNA, 20 bp, Homo Sapiens
catggaaacaaataaaagat

SEQ ID NO: 11231 - DNA, 20 bp, Homo Sapiens
atggaaacaaataaaagatc

SEQ ID NO: 11232 - DNA, 20 bp, Homo Sapiens
tggaaacaaataaaagatct

SEQ ID NO: 11233 - DNA, 20 bp, Homo Sapiens
ggaaacaaataaaagatctc

SEQ ID NO: 11234 - DNA, 20 bp, Homo Sapiens
gaaacaaataaaagatctca

SEQ ID NO: 11235 - DNA, 20 bp, Homo Sapiens
aaacaaataaaagatctcag

SEQ ID NO: 11236 - DNA, 20 bp, Homo Sapiens
aacaaataaaagatctcaga

SEQ ID NO: 11237 - DNA, 20 bp, Homo Sapiens
acaaataaaagatctcagaa

SEQ ID NO: 11238 - DNA, 20 bp, Homo Sapiens
caaataaaagatctcagaat

SEQ ID NO: 11239 - DNA, 20 bp, Homo Sapiens
aaataaaagatctcagaatt

SEQ ID NO: 11240 - DNA, 20 bp, Homo Sapiens
aataaaagatctcagaattc

SEQ ID NO: 11241 - DNA, 20 bp, Homo Sapiens
ataaaagatctcagaattca

SEQ ID NO: 11242 - DNA, 20 bp, Homo Sapiens
taaaagatctcagaattcac

SEQ ID NO: 11243 - DNA, 20 bp, Homo Sapiens
aaaagatctcagaattcact

SEQ ID NO: 11244 - DNA, 20 bp, Homo Sapiens
aaagatctcagaattcacta

SEQ ID NO: 11245 - DNA, 20 bp, Homo Sapiens
aagatctcagaattcactaa

SEQ ID NO: 11246 - DNA, 20 bp, Homo Sapiens
agatctcagaattcactaaa

SEQ ID NO: 11247 - DNA, 20 bp, Homo Sapiens
gatctcagaattcactaaaa

SEQ ID NO: 11248 - DNA, 20 bp, Homo Sapiens
atctcagaattcactaaaaa

SEQ ID NO: 11249 - DNA, 20 bp, Homo Sapiens
tctcagaattcactaaaaaa

SEQ ID NO: 11250 - DNA, 20 bp, Homo Sapiens
ctcagaattcactaaaaaaa

SEQ ID NO: 11251 - DNA, 20 bp, Homo Sapiens
tcagaattcactaaaaaaaa

SEQ ID NO: 11252 - DNA, 20 bp, Homo Sapiens
cagaattcactaaaaaaaaa

SEQ ID NO: 11253 - DNA, 20 bp, Homo Sapiens
agaattcactaaaaaaaaaa

SEQ ID NO: 11254 - DNA, 20 bp, Homo Sapiens
gaattcactaaaaaaaaaaa

SEQ ID NO: 11255 - DNA, 20 bp, Homo Sapiens
tttcgctttcattttgggcc

SEQ ID NO: 11256 - DNA, 20 bp, Homo Sapiens
ttcgctttcattttgggccg

SEQ ID NO: 11257 - DNA, 20 bp, Homo Sapiens
tcgctttcattttgggccga

SEQ ID NO: 11258 - DNA, 20 bp, Homo Sapiens
cgctttcattttgggccgag

SEQ ID NO: 11259 - DNA, 20 bp, Homo Sapiens
gctttcattttgggccgagc

SEQ ID NO: 11260 - DNA, 20 bp, Homo Sapiens
ctttcattttgggccgagct

SEQ ID NO: 11261 - DNA, 20 bp, Homo Sapiens
tttcattttgggccgagctg

SEQ ID NO: 11262 - DNA, 20 bp, Homo Sapiens
ttcattttgggccgagctgg

SEQ ID NO: 11263 - DNA, 20 bp, Homo Sapiens
tcattttgggccgagctgga

SEQ ID NO: 11264 - DNA, 20 bp, Homo Sapiens
cattttgggccgagctggag

SEQ ID NO: 11265 - DNA, 20 bp, Homo Sapiens
attttgggccgagctggagg

SEQ ID NO: 11266 - DNA, 20 bp, Homo Sapiens
ttttgggccgagctggaggc

SEQ ID NO: 11267 - DNA, 20 bp, Homo Sapiens
tttgggccgagctggaggcg

SEQ ID NO: 11268 - DNA, 20 bp, Homo Sapiens
ttgggccgagctggaggcgg

SEQ ID NO: 11269 - DNA, 20 bp, Homo Sapiens
tgggccgagctggaggcggc

SEQ ID NO: 11270 - DNA, 20 bp, Homo Sapiens
gggccgagctggaggcggcg

SEQ ID NO: 11271 - DNA, 20 bp, Homo Sapiens
ggccgagctggaggcggcgg

SEQ ID NO: 11272 - DNA, 20 bp, Homo Sapiens
gccgagctggaggcggcggg

SEQ ID NO: 11273 - DNA, 20 bp, Homo Sapiens
ccgagctggaggcggcgggg

SEQ ID NO: 11274 - DNA, 20 bp, Homo Sapiens
cgagctggaggcggcggggc

SEQ ID NO: 11275 - DNA, 20 bp, Homo Sapiens
gagctggaggcggcggggcc

SEQ ID NO: 11276 - DNA, 20 bp, Homo Sapiens
agctggaggcggcggggccg

SEQ ID NO: 11277 - DNA, 20 bp, Homo Sapiens
gctggaggcggcggggccgt

SEQ ID NO: 11278 - DNA, 20 bp, Homo Sapiens
ctggaggcggcggggccgtc

SEQ ID NO: 11279 - DNA, 20 bp, Homo Sapiens
tggaggcggcggggccgtcc

SEQ ID NO: 11280 - DNA, 20 bp, Homo Sapiens
ggaggcggcggggccgtccc

SEQ ID NO: 11281 - DNA, 20 bp, Homo Sapiens
gaggcggcggggccgtcccg

SEQ ID NO: 11282 - DNA, 20 bp, Homo Sapiens
aggcggcggggccgtcccgg

SEQ ID NO: 11283 - DNA, 20 bp, Homo Sapiens
ggcggcggggccgtcccgga

SEQ ID NO: 11284 - DNA, 20 bp, Homo Sapiens
gcggcggggccgtcccggaa

SEQ ID NO: 11285 - DNA, 20 bp, Homo Sapiens
cggcggggccgtcccggaac

SEQ ID NO: 11286 - DNA, 20 bp, Homo Sapiens
ggcggggccgtcccggaacg

SEQ ID NO: 11287 - DNA, 20 bp, Homo Sapiens
gcggggccgtcccggaacgg

SEQ ID NO: 11288 - DNA, 20 bp, Homo Sapiens
cggggccgtcccggaacggc

SEQ ID NO: 11289 - DNA, 20 bp, Homo Sapiens
ggggccgtcccggaacggct

SEQ ID NO: 11290 - DNA, 20 bp, Homo Sapiens
gggccgtcccggaacggctg

SEQ ID NO: 11291 - DNA, 20 bp, Homo Sapiens
ggccgtcccggaacggctgc

SEQ ID NO: 11292 - DNA, 20 bp, Homo Sapiens
gccgtcccggaacggctgcg

SEQ ID NO: 11293 - DNA, 20 bp, Homo Sapiens
ccgtcccggaacggctgcgg

SEQ ID NO: 11294 - DNA, 20 bp, Homo Sapiens
cgtcccggaacggctgcggc

SEQ ID NO: 11295 - DNA, 20 bp, Homo Sapiens
gtcccggaacggctgcggcc

SEQ ID NO: 11296 - DNA, 20 bp, Homo Sapiens
tcccggaacggctgcggccg

SEQ ID NO: 11297 - DNA, 20 bp, Homo Sapiens
cccggaacggctgcggccgg

SEQ ID NO: 11298 - DNA, 20 bp, Homo Sapiens
ccggaacggctgcggccggg

SEQ ID NO: 11299 - DNA, 20 bp, Homo Sapiens
cggaacggctgcggccgggc

SEQ ID NO: 11300 - DNA, 20 bp, Homo Sapiens
ggaacggctgcggccgggca

SEQ ID NO: 11301 - DNA, 20 bp, Homo Sapiens
gaacggctgcggccgggcac

SEQ ID NO: 11302 - DNA, 20 bp, Homo Sapiens
aacggctgcggccgggcacc

SEQ ID NO: 11303 - DNA, 20 bp, Homo Sapiens
acggctgcggccgggcaccc

SEQ ID NO: 11304 - DNA, 20 bp, Homo Sapiens
cggctgcggccgggcacccc

SEQ ID NO: 11305 - DNA, 20 bp, Homo Sapiens
ggctgcggccgggcaccccg

SEQ ID NO: 11306 - DNA, 20 bp, Homo Sapiens
gctgcggccgggcaccccgg

SEQ ID NO: 11307 - DNA, 20 bp, Homo Sapiens
ctgcggccgggcaccccggg

SEQ ID NO: 11308 - DNA, 20 bp, Homo Sapiens
tgcggccgggcaccccggga

SEQ ID NO: 11309 - DNA, 20 bp, Homo Sapiens
gcggccgggcaccccgggag

SEQ ID NO: 11310 - DNA, 20 bp, Homo Sapiens
cggccgggcaccccgggagt

SEQ ID NO: 11311 - DNA, 20 bp, Homo Sapiens
ggccgggcaccccgggagtt

SEQ ID NO: 11312 - DNA, 20 bp, Homo Sapiens
gccgggcaccccgggagtta

SEQ ID NO: 11313 - DNA, 20 bp, Homo Sapiens
ccgggcaccccgggagttaa

SEQ ID NO: 11314 - DNA, 20 bp, Homo Sapiens
cgggcaccccgggagttaat

SEQ ID NO: 11315 - DNA, 20 bp, Homo Sapiens
gggcaccccgggagttaatc

SEQ ID NO: 11316 - DNA, 20 bp, Homo Sapiens
ggcaccccgggagttaatcc

SEQ ID NO: 11317 - DNA, 20 bp, Homo Sapiens
gcaccccgggagttaatccg

SEQ ID NO: 11318 - DNA, 20 bp, Homo Sapiens
caccccgggagttaatccga

SEQ ID NO: 11319 - DNA, 20 bp, Homo Sapiens
accccgggagttaatccgaa

SEQ ID NO: 11320 - DNA, 20 bp, Homo Sapiens
ccccgggagttaatccgaaa

SEQ ID NO: 11321 - DNA, 20 bp, Homo Sapiens
cccgggagttaatccgaaag

SEQ ID NO: 11322 - DNA, 20 bp, Homo Sapiens
ccgggagttaatccgaaagc

SEQ ID NO: 11323 - DNA, 20 bp, Homo Sapiens
cgggagttaatccgaaagcg

SEQ ID NO: 11324 - DNA, 20 bp, Homo Sapiens
gggagttaatccgaaagcgc

SEQ ID NO: 11325 - DNA, 20 bp, Homo Sapiens
ggagttaatccgaaagcgcc

SEQ ID NO: 11326 - DNA, 20 bp, Homo Sapiens
gagttaatccgaaagcgccg

SEQ ID NO: 11327 - DNA, 20 bp, Homo Sapiens
agttaatccgaaagcgccgc

SEQ ID NO: 11328 - DNA, 20 bp, Homo Sapiens
gttaatccgaaagcgccgca

SEQ ID NO: 11329 - DNA, 20 bp, Homo Sapiens
ttaatccgaaagcgccgcaa

SEQ ID NO: 11330 - DNA, 20 bp, Homo Sapiens
taatccgaaagcgccgcaag

SEQ ID NO: 11331 - DNA, 20 bp, Homo Sapiens
aatccgaaagcgccgcaagc

SEQ ID NO: 11332 - DNA, 20 bp, Homo Sapiens
atccgaaagcgccgcaagcc

SEQ ID NO: 11333 - DNA, 20 bp, Homo Sapiens
tccgaaagcgccgcaagccc

SEQ ID NO: 11334 - DNA, 20 bp, Homo Sapiens
ccgaaagcgccgcaagcccc

SEQ ID NO: 11335 - DNA, 20 bp, Homo Sapiens
cgaaagcgccgcaagccccg

SEQ ID NO: 11336 - DNA, 20 bp, Homo Sapiens
gaaagcgccgcaagccccgc

SEQ ID NO: 11337 - DNA, 20 bp, Homo Sapiens
aaagcgccgcaagccccgcg

SEQ ID NO: 11338 - DNA, 20 bp, Homo Sapiens
aagcgccgcaagccccgcgg

SEQ ID NO: 11339 - DNA, 20 bp, Homo Sapiens
agcgccgcaagccccgcggg

SEQ ID NO: 11340 - DNA, 20 bp, Homo Sapiens
gcgccgcaagccccgcgggc

SEQ ID NO: 11341 - DNA, 20 bp, Homo Sapiens
cgccgcaagccccgcgggcc

SEQ ID NO: 11342 - DNA, 20 bp, Homo Sapiens
gccgcaagccccgcgggccg

SEQ ID NO: 11343 - DNA, 20 bp, Homo Sapiens
ccgcaagccccgcgggccgg

SEQ ID NO: 11344 - DNA, 20 bp, Homo Sapiens
cgcaagccccgcgggccggc

SEQ ID NO: 11345 - DNA, 20 bp, Homo Sapiens
gcaagccccgcgggccggcc

SEQ ID NO: 11346 - DNA, 20 bp, Homo Sapiens
caagccccgcgggccggccg

SEQ ID NO: 11347 - DNA, 20 bp, Homo Sapiens
aagccccgcgggccggccgc

SEQ ID NO: 11348 - DNA, 20 bp, Homo Sapiens
agccccgcgggccggccgca

SEQ ID NO: 11349 - DNA, 20 bp, Homo Sapiens
gccccgcgggccggccgcac

SEQ ID NO: 11350 - DNA, 20 bp, Homo Sapiens
ccccgcgggccggccgcacc

SEQ ID NO: 11351 - DNA, 20 bp, Homo Sapiens
cccgcgggccggccgcaccg

SEQ ID NO: 11352 - DNA, 20 bp, Homo Sapiens
ccgcgggccggccgcaccgc

SEQ ID NO: 11353 - DNA, 20 bp, Homo Sapiens
cgcgggccggccgcaccgca

SEQ ID NO: 11354 - DNA, 20 bp, Homo Sapiens
gcgggccggccgcaccgcac

SEQ ID NO: 11355 - DNA, 20 bp, Homo Sapiens
cgggccggccgcaccgcacg

SEQ ID NO: 11356 - DNA, 20 bp, Homo Sapiens
gggccggccgcaccgcacgt

SEQ ID NO: 11357 - DNA, 20 bp, Homo Sapiens
ggccggccgcaccgcacgtg

SEQ ID NO: 11358 - DNA, 20 bp, Homo Sapiens
gccggccgcaccgcacgtgt

SEQ ID NO: 11359 - DNA, 20 bp, Homo Sapiens
ccggccgcaccgcacgtgtc

SEQ ID NO: 11360 - DNA, 20 bp, Homo Sapiens
cggccgcaccgcacgtgtca

SEQ ID NO: 11361 - DNA, 20 bp, Homo Sapiens
ggccgcaccgcacgtgtcac

SEQ ID NO: 11362 - DNA, 20 bp, Homo Sapiens
gccgcaccgcacgtgtcacc

SEQ ID NO: 11363 - DNA, 20 bp, Homo Sapiens
ccgcaccgcacgtgtcaccg

SEQ ID NO: 11364 - DNA, 20 bp, Homo Sapiens
cgcaccgcacgtgtcaccga

SEQ ID NO: 11365 - DNA, 20 bp, Homo Sapiens
gcaccgcacgtgtcaccgag

SEQ ID NO: 11366 - DNA, 20 bp, Homo Sapiens
caccgcacgtgtcaccgaga

SEQ ID NO: 11367 - DNA, 20 bp, Homo Sapiens
accgcacgtgtcaccgagaa

SEQ ID NO: 11368 - DNA, 20 bp, Homo Sapiens
ccgcacgtgtcaccgagaag

SEQ ID NO: 11369 - DNA, 20 bp, Homo Sapiens
cgcacgtgtcaccgagaagc

SEQ ID NO: 11370 - DNA, 20 bp, Homo Sapiens
gcacgtgtcaccgagaagct

SEQ ID NO: 11371 - DNA, 20 bp, Homo Sapiens
cacgtgtcaccgagaagctg

SEQ ID NO: 11372 - DNA, 20 bp, Homo Sapiens
acgtgtcaccgagaagctga

SEQ ID NO: 11373 - DNA, 20 bp, Homo Sapiens
cgtgtcaccgagaagctgat

SEQ ID NO: 11374 - DNA, 20 bp, Homo Sapiens
gtgtcaccgagaagctgatg

SEQ ID NO: 11375 - DNA, 20 bp, Homo Sapiens
tgtcaccgagaagctgatgt

SEQ ID NO: 11376 - DNA, 20 bp, Homo Sapiens
gtcaccgagaagctgatgta

SEQ ID NO: 11377 - DNA, 20 bp, Homo Sapiens
tcaccgagaagctgatgtag

SEQ ID NO: 11378 - DNA, 20 bp, Homo Sapiens
caccgagaagctgatgtaga

SEQ ID NO: 11379 - DNA, 20 bp, Homo Sapiens
accgagaagctgatgtagag

SEQ ID NO: 11380 - DNA, 20 bp, Homo Sapiens
ccgagaagctgatgtagaga

SEQ ID NO: 11381 - DNA, 20 bp, Homo Sapiens
cgagaagctgatgtagagag

SEQ ID NO: 11382 - DNA, 20 bp, Homo Sapiens
gagaagctgatgtagagaga

SEQ ID NO: 11383 - DNA, 20 bp, Homo Sapiens
agaagctgatgtagagagag

SEQ ID NO: 11384 - DNA, 20 bp, Homo Sapiens
gaagctgatgtagagagaga

SEQ ID NO: 11385 - DNA, 20 bp, Homo Sapiens
aagctgatgtagagagagac

SEQ ID NO: 11386 - DNA, 20 bp, Homo Sapiens
agctgatgtagagagagaca

SEQ ID NO: 11387 - DNA, 20 bp, Homo Sapiens
gctgatgtagagagagacac

SEQ ID NO: 11388 - DNA, 20 bp, Homo Sapiens
ctgatgtagagagagacaca

SEQ ID NO: 11389 - DNA, 20 bp, Homo Sapiens
tgatgtagagagagacacag

SEQ ID NO: 11390 - DNA, 20 bp, Homo Sapiens
gatgtagagagagacacaga

SEQ ID NO: 11391 - DNA, 20 bp, Homo Sapiens
atgtagagagagacacagaa

SEQ ID NO: 11392 - DNA, 20 bp, Homo Sapiens
tgtagagagagacacagaag

SEQ ID NO: 11393 - DNA, 20 bp, Homo Sapiens
gtagagagagacacagaagg

SEQ ID NO: 11394 - DNA, 20 bp, Homo Sapiens
tagagagagacacagaagga

SEQ ID NO: 11395 - DNA, 20 bp, Homo Sapiens
agagagagacacagaaggag

SEQ ID NO: 11396 - DNA, 20 bp, Homo Sapiens
gagagagacacagaaggaga

SEQ ID NO: 11397 - DNA, 20 bp, Homo Sapiens
agagagacacagaaggagac

SEQ ID NO: 11398 - DNA, 20 bp, Homo Sapiens
gagagacacagaaggagaca

SEQ ID NO: 11399 - DNA, 20 bp, Homo Sapiens
agagacacagaaggagacag

SEQ ID NO: 11400 - DNA, 20 bp, Homo Sapiens
gagacacagaaggagacaga

SEQ ID NO: 11401 - DNA, 20 bp, Homo Sapiens
agacacagaaggagacagaa

SEQ ID NO: 11402 - DNA, 20 bp, Homo Sapiens
gacacagaaggagacagaaa

SEQ ID NO: 11403 - DNA, 20 bp, Homo Sapiens
acacagaaggagacagaaag

SEQ ID NO: 11404 - DNA, 20 bp, Homo Sapiens
cacagaaggagacagaaagc

SEQ ID NO: 11405 - DNA, 20 bp, Homo Sapiens
acagaaggagacagaaagca

SEQ ID NO: 11406 - DNA, 20 bp, Homo Sapiens
cagaaggagacagaaagcaa

SEQ ID NO: 11407 - DNA, 20 bp, Homo Sapiens
agaaggagacagaaagcaag

SEQ ID NO: 11408 - DNA, 20 bp, Homo Sapiens
gaaggagacagaaagcaaga

SEQ ID NO: 11409 - DNA, 20 bp, Homo Sapiens
aaggagacagaaagcaagag

SEQ ID NO: 11410 - DNA, 20 bp, Homo Sapiens
aggagacagaaagcaagaga

SEQ ID NO: 11411 - DNA, 20 bp, Homo Sapiens
ggagacagaaagcaagagac

SEQ ID NO: 11412 - DNA, 20 bp, Homo Sapiens
gagacagaaagcaagagacc

SEQ ID NO: 11413 - DNA, 20 bp, Homo Sapiens
agacagaaagcaagagacca

SEQ ID NO: 11414 - DNA, 20 bp, Homo Sapiens
gacagaaagcaagagaccag

SEQ ID NO: 11415 - DNA, 20 bp, Homo Sapiens
acagaaagcaagagaccaga

SEQ ID NO: 11416 - DNA, 20 bp, Homo Sapiens
cagaaagcaagagaccagag

SEQ ID NO: 11417 - DNA, 20 bp, Homo Sapiens
agaaagcaagagaccagagt

SEQ ID NO: 11418 - DNA, 20 bp, Homo Sapiens
gaaagcaagagaccagagtc

SEQ ID NO: 11419 - DNA, 20 bp, Homo Sapiens
aaagcaagagaccagagtcc

SEQ ID NO: 11420 - DNA, 20 bp, Homo Sapiens
aagcaagagaccagagtccc

SEQ ID NO: 11421 - DNA, 20 bp, Homo Sapiens
agcaagagaccagagtcccg

SEQ ID NO: 11422 - DNA, 20 bp, Homo Sapiens
gcaagagaccagagtcccgg

SEQ ID NO: 11423 - DNA, 20 bp, Homo Sapiens
caagagaccagagtcccggg

SEQ ID NO: 11424 - DNA, 20 bp, Homo Sapiens
aagagaccagagtcccggga

SEQ ID NO: 11425 - DNA, 20 bp, Homo Sapiens
agagaccagagtcccgggaa

SEQ ID NO: 11426 - DNA, 20 bp, Homo Sapiens
gagaccagagtcccgggaaa

SEQ ID NO: 11427 - DNA, 20 bp, Homo Sapiens
agaccagagtcccgggaaag

SEQ ID NO: 11428 - DNA, 20 bp, Homo Sapiens
gaccagagtcccgggaaagt

SEQ ID NO: 11429 - DNA, 20 bp, Homo Sapiens
accagagtcccgggaaagtc

SEQ ID NO: 11430 - DNA, 20 bp, Homo Sapiens
ccagagtcccgggaaagtcc

SEQ ID NO: 11431 - DNA, 20 bp, Homo Sapiens
cagagtcccgggaaagtcct

SEQ ID NO: 11432 - DNA, 20 bp, Homo Sapiens
agagtcccgggaaagtcctg

SEQ ID NO: 11433 - DNA, 20 bp, Homo Sapiens
gagtcccgggaaagtcctgc

SEQ ID NO: 11434 - DNA, 20 bp, Homo Sapiens
agtcccgggaaagtcctgcc

SEQ ID NO: 11435 - DNA, 20 bp, Homo Sapiens
gtcccgggaaagtcctgccg

SEQ ID NO: 11436 - DNA, 20 bp, Homo Sapiens
tcccgggaaagtcctgccgc

SEQ ID NO: 11437 - DNA, 20 bp, Homo Sapiens
cccgggaaagtcctgccgcg

SEQ ID NO: 11438 - DNA, 20 bp, Homo Sapiens
ccgggaaagtcctgccgcgc

SEQ ID NO: 11439 - DNA, 20 bp, Homo Sapiens
cgggaaagtcctgccgcgcc

SEQ ID NO: 11440 - DNA, 20 bp, Homo Sapiens
gggaaagtcctgccgcgcct

SEQ ID NO: 11441 - DNA, 20 bp, Homo Sapiens
ggaaagtcctgccgcgcctc

SEQ ID NO: 11442 - DNA, 20 bp, Homo Sapiens
gaaagtcctgccgcgcctcg

SEQ ID NO: 11443 - DNA, 20 bp, Homo Sapiens
aaagtcctgccgcgcctcgg

SEQ ID NO: 11444 - DNA, 20 bp, Homo Sapiens
aagtcctgccgcgcctcggg

SEQ ID NO: 11445 - DNA, 20 bp, Homo Sapiens
agtcctgccgcgcctcggga

SEQ ID NO: 11446 - DNA, 20 bp, Homo Sapiens
gtcctgccgcgcctcgggac

SEQ ID NO: 11447 - DNA, 20 bp, Homo Sapiens
tcctgccgcgcctcgggaca

SEQ ID NO: 11448 - DNA, 20 bp, Homo Sapiens
cctgccgcgcctcgggacaa

SEQ ID NO: 11449 - DNA, 20 bp, Homo Sapiens
ctgccgcgcctcgggacaat

SEQ ID NO: 11450 - DNA, 20 bp, Homo Sapiens
tgccgcgcctcgggacaatt

SEQ ID NO: 11451 - DNA, 20 bp, Homo Sapiens
gccgcgcctcgggacaatta

SEQ ID NO: 11452 - DNA, 20 bp, Homo Sapiens
ccgcgcctcgggacaattat

SEQ ID NO: 11453 - DNA, 20 bp, Homo Sapiens
cgcgcctcgggacaattata

SEQ ID NO: 11454 - DNA, 20 bp, Homo Sapiens
gcgcctcgggacaattataa

SEQ ID NO: 11455 - DNA, 20 bp, Homo Sapiens
cgcctcgggacaattataaa

SEQ ID NO: 11456 - DNA, 20 bp, Homo Sapiens
gcctcgggacaattataaaa

SEQ ID NO: 11457 - DNA, 20 bp, Homo Sapiens
cctcgggacaattataaaaa

SEQ ID NO: 11458 - DNA, 20 bp, Homo Sapiens
ctcgggacaattataaaaat

SEQ ID NO: 11459 - DNA, 20 bp, Homo Sapiens
tcgggacaattataaaaatg

SEQ ID NO: 11460 - DNA, 20 bp, Homo Sapiens
cgggacaattataaaaatgt

SEQ ID NO: 11461 - DNA, 20 bp, Homo Sapiens
gggacaattataaaaatgtg

SEQ ID NO: 11462 - DNA, 20 bp, Homo Sapiens
ggacaattataaaaatgtgg

SEQ ID NO: 11463 - DNA, 20 bp, Homo Sapiens
gacaattataaaaatgtggc

SEQ ID NO: 11464 - DNA, 20 bp, Homo Sapiens
acaattataaaaatgtggcc

SEQ ID NO: 11465 - DNA, 20 bp, Homo Sapiens
caattataaaaatgtggccc

SEQ ID NO: 11466 - DNA, 20 bp, Homo Sapiens
aattataaaaatgtggcccc

SEQ ID NO: 11467 - DNA, 20 bp, Homo Sapiens
attataaaaatgtggccccc

SEQ ID NO: 11468 - DNA, 20 bp, Homo Sapiens
ttataaaaatgtggccccct

SEQ ID NO: 11469 - DNA, 20 bp, Homo Sapiens
tataaaaatgtggccccctg

SEQ ID NO: 11470 - DNA, 20 bp, Homo Sapiens
ataaaaatgtggccccctgg

SEQ ID NO: 11471 - DNA, 20 bp, Homo Sapiens
taaaaatgtggccccctggg

SEQ ID NO: 11472 - DNA, 20 bp, Homo Sapiens
aaaaatgtggccccctgggt

SEQ ID NO: 11473 - DNA, 20 bp, Homo Sapiens
aaaatgtggccccctgggtc

SEQ ID NO: 11474 - DNA, 20 bp, Homo Sapiens
aaatgtggccccctgggtca

SEQ ID NO: 11475 - DNA, 20 bp, Homo Sapiens
aatgtggccccctgggtcag

SEQ ID NO: 11476 - DNA, 20 bp, Homo Sapiens
atgtggccccctgggtcagc

SEQ ID NO: 11477 - DNA, 20 bp, Homo Sapiens
tgtggccccctgggtcagcc

SEQ ID NO: 11478 - DNA, 20 bp, Homo Sapiens
gtggccccctgggtcagcct

SEQ ID NO: 11479 - DNA, 20 bp, Homo Sapiens
tggccccctgggtcagcctc

SEQ ID NO: 11480 - DNA, 20 bp, Homo Sapiens
ggccccctgggtcagcctcc

SEQ ID NO: 11481 - DNA, 20 bp, Homo Sapiens
gccccctgggtcagcctccc

SEQ ID NO: 11482 - DNA, 20 bp, Homo Sapiens
ccccctgggtcagcctccca

SEQ ID NO: 11483 - DNA, 20 bp, Homo Sapiens
cccctgggtcagcctcccag

SEQ ID NO: 11484 - DNA, 20 bp, Homo Sapiens
ccctgggtcagcctcccagc

SEQ ID NO: 11485 - DNA, 20 bp, Homo Sapiens
cctgggtcagcctcccagcc

SEQ ID NO: 11486 - DNA, 20 bp, Homo Sapiens
ctgggtcagcctcccagcca

SEQ ID NO: 11487 - DNA, 20 bp, Homo Sapiens
tgggtcagcctcccagccac

SEQ ID NO: 11488 - DNA, 20 bp, Homo Sapiens
gggtcagcctcccagccacc

SEQ ID NO: 11489 - DNA, 20 bp, Homo Sapiens
ggtcagcctcccagccaccg

SEQ ID NO: 11490 - DNA, 20 bp, Homo Sapiens
gtcagcctcccagccaccgc

SEQ ID NO: 11491 - DNA, 20 bp, Homo Sapiens
tcagcctcccagccaccgcc

SEQ ID NO: 11492 - DNA, 20 bp, Homo Sapiens
cagcctcccagccaccgccc

SEQ ID NO: 11493 - DNA, 20 bp, Homo Sapiens
agcctcccagccaccgccct

SEQ ID NO: 11494 - DNA, 20 bp, Homo Sapiens
gcctcccagccaccgccctc

SEQ ID NO: 11495 - DNA, 20 bp, Homo Sapiens
cctcccagccaccgccctca

SEQ ID NO: 11496 - DNA, 20 bp, Homo Sapiens
ctcccagccaccgccctcac

SEQ ID NO: 11497 - DNA, 20 bp, Homo Sapiens
tcccagccaccgccctcacc

SEQ ID NO: 11498 - DNA, 20 bp, Homo Sapiens
cccagccaccgccctcacct

SEQ ID NO: 11499 - DNA, 20 bp, Homo Sapiens
ccagccaccgccctcacctg

SEQ ID NO: 11500 - DNA, 20 bp, Homo Sapiens
cagccaccgccctcacctgc

SEQ ID NO: 11501 - DNA, 20 bp, Homo Sapiens
agccaccgccctcacctgcc

SEQ ID NO: 11502 - DNA, 20 bp, Homo Sapiens
gccaccgccctcacctgccg

SEQ ID NO: 11503 - DNA, 20 bp, Homo Sapiens
ccaccgccctcacctgccgc

SEQ ID NO: 11504 - DNA, 20 bp, Homo Sapiens
caccgccctcacctgccgcg

SEQ ID NO: 11505 - DNA, 20 bp, Homo Sapiens
accgccctcacctgccgcgg

SEQ ID NO: 11506 - DNA, 20 bp, Homo Sapiens
ccgccctcacctgccgcggc

SEQ ID NO: 11507 - DNA, 20 bp, Homo Sapiens
cgccctcacctgccgcggcc

SEQ ID NO: 11508 - DNA, 20 bp, Homo Sapiens
gccctcacctgccgcggcca

SEQ ID NO: 11509 - DNA, 20 bp, Homo Sapiens
ccctcacctgccgcggccac

SEQ ID NO: 11510 - DNA, 20 bp, Homo Sapiens
cctcacctgccgcggccaca

SEQ ID NO: 11511 - DNA, 20 bp, Homo Sapiens
ctcacctgccgcggccacag

SEQ ID NO: 11512 - DNA, 20 bp, Homo Sapiens
tcacctgccgcggccacagg

SEQ ID NO: 11513 - DNA, 20 bp, Homo Sapiens
cacctgccgcggccacaggt

SEQ ID NO: 11514 - DNA, 20 bp, Homo Sapiens
acctgccgcggccacaggtc

SEQ ID NO: 11515 - DNA, 20 bp, Homo Sapiens
cctgccgcggccacaggtct

SEQ ID NO: 11516 - DNA, 20 bp, Homo Sapiens
ctgccgcggccacaggtctg

SEQ ID NO: 11517 - DNA, 20 bp, Homo Sapiens
tgccgcggccacaggtctgc

SEQ ID NO: 11518 - DNA, 20 bp, Homo Sapiens
gccgcggccacaggtctgca

SEQ ID NO: 11519 - DNA, 20 bp, Homo Sapiens
ccgcggccacaggtctgcat

SEQ ID NO: 11520 - DNA, 20 bp, Homo Sapiens
cgcggccacaggtctgcatc

SEQ ID NO: 11521 - DNA, 20 bp, Homo Sapiens
gcggccacaggtctgcatcc

SEQ ID NO: 11522 - DNA, 20 bp, Homo Sapiens
cggccacaggtctgcatcca

SEQ ID NO: 11523 - DNA, 20 bp, Homo Sapiens
ggccacaggtctgcatccag

SEQ ID NO: 11524 - DNA, 20 bp, Homo Sapiens
gccacaggtctgcatccagc

SEQ ID NO: 11525 - DNA, 20 bp, Homo Sapiens
ccacaggtctgcatccagcg

SEQ ID NO: 11526 - DNA, 20 bp, Homo Sapiens
cacaggtctgcatccagcgg

SEQ ID NO: 11527 - DNA, 20 bp, Homo Sapiens
acaggtctgcatccagcggc

SEQ ID NO: 11528 - DNA, 20 bp, Homo Sapiens
caggtctgcatccagcggct

SEQ ID NO: 11529 - DNA, 20 bp, Homo Sapiens
aggtctgcatccagcggctc

SEQ ID NO: 11530 - DNA, 20 bp, Homo Sapiens
ggtctgcatccagcggctcg

SEQ ID NO: 11531 - DNA, 20 bp, Homo Sapiens
gtctgcatccagcggctcgc

SEQ ID NO: 11532 - DNA, 20 bp, Homo Sapiens
tctgcatccagcggctcgcc

SEQ ID NO: 11533 - DNA, 20 bp, Homo Sapiens
ctgcatccagcggctcgccc

SEQ ID NO: 11534 - DNA, 20 bp, Homo Sapiens
tgcatccagcggctcgccct

SEQ ID NO: 11535 - DNA, 20 bp, Homo Sapiens
gcatccagcggctcgccctg

SEQ ID NO: 11536 - DNA, 20 bp, Homo Sapiens
catccagcggctcgccctgt

SEQ ID NO: 11537 - DNA, 20 bp, Homo Sapiens
atccagcggctcgccctgtg

SEQ ID NO: 11538 - DNA, 20 bp, Homo Sapiens
tccagcggctcgccctgtgt

SEQ ID NO: 11539 - DNA, 20 bp, Homo Sapiens
ccagcggctcgccctgtgtc

SEQ ID NO: 11540 - DNA, 20 bp, Homo Sapiens
cagcggctcgccctgtgtcc

SEQ ID NO: 11541 - DNA, 20 bp, Homo Sapiens
agcggctcgccctgtgtccc

SEQ ID NO: 11542 - DNA, 20 bp, Homo Sapiens
gcggctcgccctgtgtccct

SEQ ID NO: 11543 - DNA, 20 bp, Homo Sapiens
cggctcgccctgtgtccctg

SEQ ID NO: 11544 - DNA, 20 bp, Homo Sapiens
ggctcgccctgtgtccctgc

SEQ ID NO: 11545 - DNA, 20 bp, Homo Sapiens
gctcgccctgtgtccctgca

SEQ ID NO: 11546 - DNA, 20 bp, Homo Sapiens
ctcgccctgtgtccctgcag

SEQ ID NO: 11547 - DNA, 20 bp, Homo Sapiens
tcgccctgtgtccctgcagt

SEQ ID NO: 11548 - DNA, 20 bp, Homo Sapiens
cgccctgtgtccctgcagtg

SEQ ID NO: 11549 - DNA, 20 bp, Homo Sapiens
gccctgtgtccctgcagtgc

SEQ ID NO: 11550 - DNA, 20 bp, Homo Sapiens
ccctgtgtccctgcagtgcc

SEQ ID NO: 11551 - DNA, 20 bp, Homo Sapiens
cctgtgtccctgcagtgccg

SEQ ID NO: 11552 - DNA, 20 bp, Homo Sapiens
ctgtgtccctgcagtgccgg

SEQ ID NO: 11553 - DNA, 20 bp, Homo Sapiens
tgtgtccctgcagtgccggc

SEQ ID NO: 11554 - DNA, 20 bp, Homo Sapiens
gtgtccctgcagtgccggct

SEQ ID NO: 11555 - DNA, 20 bp, Homo Sapiens
tgtccctgcagtgccggctc

SEQ ID NO: 11556 - DNA, 20 bp, Homo Sapiens
gtccctgcagtgccggctca

SEQ ID NO: 11557 - DNA, 20 bp, Homo Sapiens
tccctgcagtgccggctcag

SEQ ID NO: 11558 - DNA, 20 bp, Homo Sapiens
ccctgcagtgccggctcagc

SEQ ID NO: 11559 - DNA, 20 bp, Homo Sapiens
cctgcagtgccggctcagca

SEQ ID NO: 11560 - DNA, 20 bp, Homo Sapiens
ctgcagtgccggctcagcat

SEQ ID NO: 11561 - DNA, 20 bp, Homo Sapiens
tgcagtgccggctcagcatg

SEQ ID NO: 11562 - DNA, 20 bp, Homo Sapiens
gcagtgccggctcagcatgt

SEQ ID NO: 11563 - DNA, 20 bp, Homo Sapiens
cagtgccggctcagcatgtg

SEQ ID NO: 11564 - DNA, 20 bp, Homo Sapiens
agtgccggctcagcatgtgt

SEQ ID NO: 11565 - DNA, 20 bp, Homo Sapiens
gtgccggctcagcatgtgtc

SEQ ID NO: 11566 - DNA, 20 bp, Homo Sapiens
tgccggctcagcatgtgtcc

SEQ ID NO: 11567 - DNA, 20 bp, Homo Sapiens
gccggctcagcatgtgtcca

SEQ ID NO: 11568 - DNA, 20 bp, Homo Sapiens
ccggctcagcatgtgtccag

SEQ ID NO: 11569 - DNA, 20 bp, Homo Sapiens
cggctcagcatgtgtccagc

SEQ ID NO: 11570 - DNA, 20 bp, Homo Sapiens
ggctcagcatgtgtccagcg

SEQ ID NO: 11571 - DNA, 20 bp, Homo Sapiens
gctcagcatgtgtccagcgc

SEQ ID NO: 11572 - DNA, 20 bp, Homo Sapiens
ctcagcatgtgtccagcgcg

SEQ ID NO: 11573 - DNA, 20 bp, Homo Sapiens
tcagcatgtgtccagcgcgc

SEQ ID NO: 11574 - DNA, 20 bp, Homo Sapiens
cagcatgtgtccagcgcgca

SEQ ID NO: 11575 - DNA, 20 bp, Homo Sapiens
agcatgtgtccagcgcgcag

SEQ ID NO: 11576 - DNA, 20 bp, Homo Sapiens
gcatgtgtccagcgcgcagc

SEQ ID NO: 11577 - DNA, 20 bp, Homo Sapiens
catgtgtccagcgcgcagcc

SEQ ID NO: 11578 - DNA, 20 bp, Homo Sapiens
atgtgtccagcgcgcagcct

SEQ ID NO: 11579 - DNA, 20 bp, Homo Sapiens
tgtgtccagcgcgcagcctc

SEQ ID NO: 11580 - DNA, 20 bp, Homo Sapiens
gtgtccagcgcgcagcctcc

SEQ ID NO: 11581 - DNA, 20 bp, Homo Sapiens
tgtccagcgcgcagcctcct

SEQ ID NO: 11582 - DNA, 20 bp, Homo Sapiens
gtccagcgcgcagcctcctc

SEQ ID NO: 11583 - DNA, 20 bp, Homo Sapiens
tccagcgcgcagcctcctcc

SEQ ID NO: 11584 - DNA, 20 bp, Homo Sapiens
ccagcgcgcagcctcctcct

SEQ ID NO: 11585 - DNA, 20 bp, Homo Sapiens
cagcgcgcagcctcctcctt

SEQ ID NO: 11586 - DNA, 20 bp, Homo Sapiens
agcgcgcagcctcctccttg

SEQ ID NO: 11587 - DNA, 20 bp, Homo Sapiens
gcgcgcagcctcctccttgt

SEQ ID NO: 11588 - DNA, 20 bp, Homo Sapiens
cgcgcagcctcctccttgtg

SEQ ID NO: 11589 - DNA, 20 bp, Homo Sapiens
gcgcagcctcctccttgtgg

SEQ ID NO: 11590 - DNA, 20 bp, Homo Sapiens
cgcagcctcctccttgtggc

SEQ ID NO: 11591 - DNA, 20 bp, Homo Sapiens
gcagcctcctccttgtggct

SEQ ID NO: 11592 - DNA, 20 bp, Homo Sapiens
cagcctcctccttgtggcta

SEQ ID NO: 11593 - DNA, 20 bp, Homo Sapiens
agcctcctccttgtggctac

SEQ ID NO: 11594 - DNA, 20 bp, Homo Sapiens
gcctcctccttgtggctacc

SEQ ID NO: 11595 - DNA, 20 bp, Homo Sapiens
cctcctccttgtggctaccc

SEQ ID NO: 11596 - DNA, 20 bp, Homo Sapiens
ctcctccttgtggctaccct

SEQ ID NO: 11597 - DNA, 20 bp, Homo Sapiens
tcctccttgtggctaccctg

SEQ ID NO: 11598 - DNA, 20 bp, Homo Sapiens
cctccttgtggctaccctgg

SEQ ID NO: 11599 - DNA, 20 bp, Homo Sapiens
ctccttgtggctaccctggt

SEQ ID NO: 11600 - DNA, 20 bp, Homo Sapiens
tccttgtggctaccctggtc

SEQ ID NO: 11601 - DNA, 20 bp, Homo Sapiens
ccttgtggctaccctggtcc

SEQ ID NO: 11602 - DNA, 20 bp, Homo Sapiens
cttgtggctaccctggtcct

SEQ ID NO: 11603 - DNA, 20 bp, Homo Sapiens
ttgtggctaccctggtcctc

SEQ ID NO: 11604 - DNA, 20 bp, Homo Sapiens
tgtggctaccctggtcctcc

SEQ ID NO: 11605 - DNA, 20 bp, Homo Sapiens
gtggctaccctggtcctcct

SEQ ID NO: 11606 - DNA, 20 bp, Homo Sapiens
tggctaccctggtcctcctg

SEQ ID NO: 11607 - DNA, 20 bp, Homo Sapiens
ggctaccctggtcctcctgg

SEQ ID NO: 11608 - DNA, 20 bp, Homo Sapiens
gctaccctggtcctcctgga

SEQ ID NO: 11609 - DNA, 20 bp, Homo Sapiens
ctaccctggtcctcctggac

SEQ ID NO: 11610 - DNA, 20 bp, Homo Sapiens
taccctggtcctcctggacc

SEQ ID NO: 11611 - DNA, 20 bp, Homo Sapiens
accctggtcctcctggacca

SEQ ID NO: 11612 - DNA, 20 bp, Homo Sapiens
ccctggtcctcctggaccac

SEQ ID NO: 11613 - DNA, 20 bp, Homo Sapiens
cctggtcctcctggaccacc

SEQ ID NO: 11614 - DNA, 20 bp, Homo Sapiens
ctggtcctcctggaccacct

SEQ ID NO: 11615 - DNA, 20 bp, Homo Sapiens
tggtcctcctggaccacctc

SEQ ID NO: 11616 - DNA, 20 bp, Homo Sapiens
ggtcctcctggaccacctca

SEQ ID NO: 11617 - DNA, 20 bp, Homo Sapiens
gtcctcctggaccacctcag

SEQ ID NO: 11618 - DNA, 20 bp, Homo Sapiens
tcctcctggaccacctcagt

SEQ ID NO: 11619 - DNA, 20 bp, Homo Sapiens
cctcctggaccacctcagtt

SEQ ID NO: 11620 - DNA, 20 bp, Homo Sapiens
ctcctggaccacctcagttt

SEQ ID NO: 11621 - DNA, 20 bp, Homo Sapiens
tcctggaccacctcagtttg

SEQ ID NO: 11622 - DNA, 20 bp, Homo Sapiens
cctggaccacctcagtttgg

SEQ ID NO: 11623 - DNA, 20 bp, Homo Sapiens
ctggaccacctcagtttggc

SEQ ID NO: 11624 - DNA, 20 bp, Homo Sapiens
tggaccacctcagtttggcc

SEQ ID NO: 11625 - DNA, 20 bp, Homo Sapiens
ggaccacctcagtttggcca

SEQ ID NO: 11626 - DNA, 20 bp, Homo Sapiens
gaccacctcagtttggccag

SEQ ID NO: 11627 - DNA, 20 bp, Homo Sapiens
accacctcagtttggccaga

SEQ ID NO: 11628 - DNA, 20 bp, Homo Sapiens
ccacctcagtttggccagaa

SEQ ID NO: 11629 - DNA, 20 bp, Homo Sapiens
cacctcagtttggccagaaa

SEQ ID NO: 11630 - DNA, 20 bp, Homo Sapiens
acctcagtttggccagaaac

SEQ ID NO: 11631 - DNA, 20 bp, Homo Sapiens
cctcagtttggccagaaacc

SEQ ID NO: 11632 - DNA, 20 bp, Homo Sapiens
ctcagtttggccagaaacct

SEQ ID NO: 11633 - DNA, 20 bp, Homo Sapiens
tcagtttggccagaaacctc

SEQ ID NO: 11634 - DNA, 20 bp, Homo Sapiens
cagtttggccagaaacctcc

SEQ ID NO: 11635 - DNA, 20 bp, Homo Sapiens
agtttggccagaaacctccc

SEQ ID NO: 11636 - DNA, 20 bp, Homo Sapiens
gtttggccagaaacctcccc

SEQ ID NO: 11637 - DNA, 20 bp, Homo Sapiens
tttggccagaaacctccccg

SEQ ID NO: 11638 - DNA, 20 bp, Homo Sapiens
ttggccagaaacctccccgt

SEQ ID NO: 11639 - DNA, 20 bp, Homo Sapiens
tggccagaaacctccccgtg

SEQ ID NO: 11640 - DNA, 20 bp, Homo Sapiens
ggccagaaacctccccgtgg

SEQ ID NO: 11641 - DNA, 20 bp, Homo Sapiens
gccagaaacctccccgtggc

SEQ ID NO: 11642 - DNA, 20 bp, Homo Sapiens
ccagaaacctccccgtggcc

SEQ ID NO: 11643 - DNA, 20 bp, Homo Sapiens
cagaaacctccccgtggcca

SEQ ID NO: 11644 - DNA, 20 bp, Homo Sapiens
agaaacctccccgtggccac

SEQ ID NO: 11645 - DNA, 20 bp, Homo Sapiens
gaaacctccccgtggccact

SEQ ID NO: 11646 - DNA, 20 bp, Homo Sapiens
aaacctccccgtggccactc

SEQ ID NO: 11647 - DNA, 20 bp, Homo Sapiens
aacctccccgtggccactcc

SEQ ID NO: 11648 - DNA, 20 bp, Homo Sapiens
acctccccgtggccactcca

SEQ ID NO: 11649 - DNA, 20 bp, Homo Sapiens
cctccccgtggccactccag

SEQ ID NO: 11650 - DNA, 20 bp, Homo Sapiens
ctccccgtggccactccaga

SEQ ID NO: 11651 - DNA, 20 bp, Homo Sapiens
tccccgtggccactccagac

SEQ ID NO: 11652 - DNA, 20 bp, Homo Sapiens
ccccgtggccactccagacc

SEQ ID NO: 11653 - DNA, 20 bp, Homo Sapiens
cccgtggccactccagaccc

SEQ ID NO: 11654 - DNA, 20 bp, Homo Sapiens
ccgtggccactccagaccca

SEQ ID NO: 11655 - DNA, 20 bp, Homo Sapiens
cgtggccactccagacccag

SEQ ID NO: 11656 - DNA, 20 bp, Homo Sapiens
gtggccactccagacccagg

SEQ ID NO: 11657 - DNA, 20 bp, Homo Sapiens
tggccactccagacccagga

SEQ ID NO: 11658 - DNA, 20 bp, Homo Sapiens
ggccactccagacccaggaa

SEQ ID NO: 11659 - DNA, 20 bp, Homo Sapiens
gccactccagacccaggaat

SEQ ID NO: 11660 - DNA, 20 bp, Homo Sapiens
ccactccagacccaggaatg

SEQ ID NO: 11661 - DNA, 20 bp, Homo Sapiens
cactccagacccaggaatgt

SEQ ID NO: 11662 - DNA, 20 bp, Homo Sapiens
actccagacccaggaatgtt

SEQ ID NO: 11663 - DNA, 20 bp, Homo Sapiens
ctccagacccaggaatgttc

SEQ ID NO: 11664 - DNA, 20 bp, Homo Sapiens
tccagacccaggaatgttcc

SEQ ID NO: 11665 - DNA, 20 bp, Homo Sapiens
ccagacccaggaatgttccc

SEQ ID NO: 11666 - DNA, 20 bp, Homo Sapiens
cagacccaggaatgttccca

SEQ ID NO: 11667 - DNA, 20 bp, Homo Sapiens
agacccaggaatgttcccat

SEQ ID NO: 11668 - DNA, 20 bp, Homo Sapiens
gacccaggaatgttcccatg

SEQ ID NO: 11669 - DNA, 20 bp, Homo Sapiens
acccaggaatgttcccatgc

SEQ ID NO: 11670 - DNA, 20 bp, Homo Sapiens
cccaggaatgttcccatgcc

SEQ ID NO: 11671 - DNA, 20 bp, Homo Sapiens
ccaggaatgttcccatgcct

SEQ ID NO: 11672 - DNA, 20 bp, Homo Sapiens
caggaatgttcccatgcctt

SEQ ID NO: 11673 - DNA, 20 bp, Homo Sapiens
aggaatgttcccatgccttc

SEQ ID NO: 11674 - DNA, 20 bp, Homo Sapiens
ggaatgttcccatgccttca

SEQ ID NO: 11675 - DNA, 20 bp, Homo Sapiens
gaatgttcccatgccttcac

SEQ ID NO: 11676 - DNA, 20 bp, Homo Sapiens
aatgttcccatgccttcacc

SEQ ID NO: 11677 - DNA, 20 bp, Homo Sapiens
atgttcccatgccttcacca

SEQ ID NO: 11678 - DNA, 20 bp, Homo Sapiens
tgttcccatgccttcaccac

SEQ ID NO: 11679 - DNA, 20 bp, Homo Sapiens
gttcccatgccttcaccact

SEQ ID NO: 11680 - DNA, 20 bp, Homo Sapiens
ttcccatgccttcaccactc

SEQ ID NO: 11681 - DNA, 20 bp, Homo Sapiens
tcccatgccttcaccactcc

SEQ ID NO: 11682 - DNA, 20 bp, Homo Sapiens
cccatgccttcaccactccc

SEQ ID NO: 11683 - DNA, 20 bp, Homo Sapiens
ccatgccttcaccactccca

SEQ ID NO: 11684 - DNA, 20 bp, Homo Sapiens
catgccttcaccactcccaa

SEQ ID NO: 11685 - DNA, 20 bp, Homo Sapiens
atgccttcaccactcccaaa

SEQ ID NO: 11686 - DNA, 20 bp, Homo Sapiens
tgccttcaccactcccaaaa

SEQ ID NO: 11687 - DNA, 20 bp, Homo Sapiens
gccttcaccactcccaaaac

SEQ ID NO: 11688 - DNA, 20 bp, Homo Sapiens
ccttcaccactcccaaaacc

SEQ ID NO: 11689 - DNA, 20 bp, Homo Sapiens
cttcaccactcccaaaacct

SEQ ID NO: 11690 - DNA, 20 bp, Homo Sapiens
ttcaccactcccaaaacctg

SEQ ID NO: 11691 - DNA, 20 bp, Homo Sapiens
tcaccactcccaaaacctgc

SEQ ID NO: 11692 - DNA, 20 bp, Homo Sapiens
caccactcccaaaacctgct

SEQ ID NO: 11693 - DNA, 20 bp, Homo Sapiens
accactcccaaaacctgctg

SEQ ID NO: 11694 - DNA, 20 bp, Homo Sapiens
ccactcccaaaacctgctga

SEQ ID NO: 11695 - DNA, 20 bp, Homo Sapiens
cactcccaaaacctgctgag

SEQ ID NO: 11696 - DNA, 20 bp, Homo Sapiens
actcccaaaacctgctgagg

SEQ ID NO: 11697 - DNA, 20 bp, Homo Sapiens
ctcccaaaacctgctgaggg

SEQ ID NO: 11698 - DNA, 20 bp, Homo Sapiens
tcccaaaacctgctgagggc

SEQ ID NO: 11699 - DNA, 20 bp, Homo Sapiens
cccaaaacctgctgagggcc

SEQ ID NO: 11700 - DNA, 20 bp, Homo Sapiens
ccaaaacctgctgagggccg

SEQ ID NO: 11701 - DNA, 20 bp, Homo Sapiens
caaaacctgctgagggccgt

SEQ ID NO: 11702 - DNA, 20 bp, Homo Sapiens
aaaacctgctgagggccgtc

SEQ ID NO: 11703 - DNA, 20 bp, Homo Sapiens
aaacctgctgagggccgtca

SEQ ID NO: 11704 - DNA, 20 bp, Homo Sapiens
aacctgctgagggccgtcag

SEQ ID NO: 11705 - DNA, 20 bp, Homo Sapiens
acctgctgagggccgtcagc

SEQ ID NO: 11706 - DNA, 20 bp, Homo Sapiens
cctgctgagggccgtcagca

SEQ ID NO: 11707 - DNA, 20 bp, Homo Sapiens
ctgctgagggccgtcagcaa

SEQ ID NO: 11708 - DNA, 20 bp, Homo Sapiens
tgctgagggccgtcagcaac

SEQ ID NO: 11709 - DNA, 20 bp, Homo Sapiens
gctgagggccgtcagcaaca

SEQ ID NO: 11710 - DNA, 20 bp, Homo Sapiens
ctgagggccgtcagcaacat

SEQ ID NO: 11711 - DNA, 20 bp, Homo Sapiens
tgagggccgtcagcaacatg

SEQ ID NO: 11712 - DNA, 20 bp, Homo Sapiens
gagggccgtcagcaacatgc

SEQ ID NO: 11713 - DNA, 20 bp, Homo Sapiens
agggccgtcagcaacatgct

SEQ ID NO: 11714 - DNA, 20 bp, Homo Sapiens
gggccgtcagcaacatgctc

SEQ ID NO: 11715 - DNA, 20 bp, Homo Sapiens
ggccgtcagcaacatgctcc

SEQ ID NO: 11716 - DNA, 20 bp, Homo Sapiens
gccgtcagcaacatgctcca

SEQ ID NO: 11717 - DNA, 20 bp, Homo Sapiens
ccgtcagcaacatgctccag

SEQ ID NO: 11718 - DNA, 20 bp, Homo Sapiens
cgtcagcaacatgctccaga

SEQ ID NO: 11719 - DNA, 20 bp, Homo Sapiens
gtcagcaacatgctccagaa

SEQ ID NO: 11720 - DNA, 20 bp, Homo Sapiens
tcagcaacatgctccagaag

SEQ ID NO: 11721 - DNA, 20 bp, Homo Sapiens
cagcaacatgctccagaagg

SEQ ID NO: 11722 - DNA, 20 bp, Homo Sapiens
agcaacatgctccagaaggc

SEQ ID NO: 11723 - DNA, 20 bp, Homo Sapiens
gcaacatgctccagaaggcc

SEQ ID NO: 11724 - DNA, 20 bp, Homo Sapiens
caacatgctccagaaggcca

SEQ ID NO: 11725 - DNA, 20 bp, Homo Sapiens
aacatgctccagaaggccag

SEQ ID NO: 11726 - DNA, 20 bp, Homo Sapiens
acatgctccagaaggccaga

SEQ ID NO: 11727 - DNA, 20 bp, Homo Sapiens
catgctccagaaggccagac

SEQ ID NO: 11728 - DNA, 20 bp, Homo Sapiens
atgctccagaaggccagaca

SEQ ID NO: 11729 - DNA, 20 bp, Homo Sapiens
tgctccagaaggccagacaa

SEQ ID NO: 11730 - DNA, 20 bp, Homo Sapiens
gctccagaaggccagacaaa

SEQ ID NO: 11731 - DNA, 20 bp, Homo Sapiens
ctccagaaggccagacaaac

SEQ ID NO: 11732 - DNA, 20 bp, Homo Sapiens
tccagaaggccagacaaact

SEQ ID NO: 11733 - DNA, 20 bp, Homo Sapiens
ccagaaggccagacaaactc

SEQ ID NO: 11734 - DNA, 20 bp, Homo Sapiens
cagaaggccagacaaactct

SEQ ID NO: 11735 - DNA, 20 bp, Homo Sapiens
agaaggccagacaaactcta

SEQ ID NO: 11736 - DNA, 20 bp, Homo Sapiens
gaaggccagacaaactctag

SEQ ID NO: 11737 - DNA, 20 bp, Homo Sapiens
aaggccagacaaactctaga

SEQ ID NO: 11738 - DNA, 20 bp, Homo Sapiens
aggccagacaaactctagaa

SEQ ID NO: 11739 - DNA, 20 bp, Homo Sapiens
ggccagacaaactctagaat

SEQ ID NO: 11740 - DNA, 20 bp, Homo Sapiens
gccagacaaactctagaatt

SEQ ID NO: 11741 - DNA, 20 bp, Homo Sapiens
ccagacaaactctagaattt

SEQ ID NO: 11742 - DNA, 20 bp, Homo Sapiens
cagacaaactctagaatttt

SEQ ID NO: 11743 - DNA, 20 bp, Homo Sapiens
agacaaactctagaatttta

SEQ ID NO: 11744 - DNA, 20 bp, Homo Sapiens
gacaaactctagaattttac

SEQ ID NO: 11745 - DNA, 20 bp, Homo Sapiens
acaaactctagaattttacc

SEQ ID NO: 11746 - DNA, 20 bp, Homo Sapiens
caaactctagaattttaccc

SEQ ID NO: 11747 - DNA, 20 bp, Homo Sapiens
aaactctagaattttaccct

SEQ ID NO: 11748 - DNA, 20 bp, Homo Sapiens
aactctagaattttaccctt

SEQ ID NO: 11749 - DNA, 20 bp, Homo Sapiens
actctagaattttacccttg

SEQ ID NO: 11750 - DNA, 20 bp, Homo Sapiens
ctctagaattttacccttgc

SEQ ID NO: 11751 - DNA, 20 bp, Homo Sapiens
tctagaattttacccttgca

SEQ ID NO: 11752 - DNA, 20 bp, Homo Sapiens
ctagaattttacccttgcac

SEQ ID NO: 11753 - DNA, 20 bp, Homo Sapiens
tagaattttacccttgcact

SEQ ID NO: 11754 - DNA, 20 bp, Homo Sapiens
agaattttacccttgcactt

SEQ ID NO: 11755 - DNA, 20 bp, Homo Sapiens
gaattttacccttgcacttc

SEQ ID NO: 11756 - DNA, 20 bp, Homo Sapiens
aattttacccttgcacttct

SEQ ID NO: 11757 - DNA, 20 bp, Homo Sapiens
attttacccttgcacttctg

SEQ ID NO: 11758 - DNA, 20 bp, Homo Sapiens
ttttacccttgcacttctga

SEQ ID NO: 11759 - DNA, 20 bp, Homo Sapiens
tttacccttgcacttctgaa

SEQ ID NO: 11760 - DNA, 20 bp, Homo Sapiens
ttacccttgcacttctgaag

SEQ ID NO: 11761 - DNA, 20 bp, Homo Sapiens
tacccttgcacttctgaaga

SEQ ID NO: 11762 - DNA, 20 bp, Homo Sapiens
acccttgcacttctgaagag

SEQ ID NO: 11763 - DNA, 20 bp, Homo Sapiens
cccttgcacttctgaagaga

SEQ ID NO: 11764 - DNA, 20 bp, Homo Sapiens
ccttgcacttctgaagagat

SEQ ID NO: 11765 - DNA, 20 bp, Homo Sapiens
cttgcacttctgaagagatt

SEQ ID NO: 11766 - DNA, 20 bp, Homo Sapiens
ttgcacttctgaagagattg

SEQ ID NO: 11767 - DNA, 20 bp, Homo Sapiens
tgcacttctgaagagattga

SEQ ID NO: 11768 - DNA, 20 bp, Homo Sapiens
gcacttctgaagagattgat

SEQ ID NO: 11769 - DNA, 20 bp, Homo Sapiens
cacttctgaagagattgatc

SEQ ID NO: 11770 - DNA, 20 bp, Homo Sapiens
acttctgaagagattgatca

SEQ ID NO: 11771 - DNA, 20 bp, Homo Sapiens
cttctgaagagattgatcat

SEQ ID NO: 11772 - DNA, 20 bp, Homo Sapiens
ttctgaagagattgatcatg

SEQ ID NO: 11773 - DNA, 20 bp, Homo Sapiens
tctgaagagattgatcatga

SEQ ID NO: 11774 - DNA, 20 bp, Homo Sapiens
ctgaagagattgatcatgaa

SEQ ID NO: 11775 - DNA, 20 bp, Homo Sapiens
tgaagagattgatcatgaag

SEQ ID NO: 11776 - DNA, 20 bp, Homo Sapiens
gaagagattgatcatgaaga

SEQ ID NO: 11777 - DNA, 20 bp, Homo Sapiens
aagagattgatcatgaagat

SEQ ID NO: 11778 - DNA, 20 bp, Homo Sapiens
agagattgatcatgaagata

SEQ ID NO: 11779 - DNA, 20 bp, Homo Sapiens
gagattgatcatgaagatat

SEQ ID NO: 11780 - DNA, 20 bp, Homo Sapiens
agattgatcatgaagatatc

SEQ ID NO: 11781 - DNA, 20 bp, Homo Sapiens
gattgatcatgaagatatca

SEQ ID NO: 11782 - DNA, 20 bp, Homo Sapiens
attgatcatgaagatatcac

SEQ ID NO: 11783 - DNA, 20 bp, Homo Sapiens
ttgatcatgaagatatcaca

SEQ ID NO: 11784 - DNA, 20 bp, Homo Sapiens
tgatcatgaagatatcacaa

SEQ ID NO: 11785 - DNA, 20 bp, Homo Sapiens
gatcatgaagatatcacaaa

SEQ ID NO: 11786 - DNA, 20 bp, Homo Sapiens
atcatgaagatatcacaaaa

SEQ ID NO: 11787 - DNA, 20 bp, Homo Sapiens
tcatgaagatatcacaaaag

SEQ ID NO: 11788 - DNA, 20 bp, Homo Sapiens
catgaagatatcacaaaaga

SEQ ID NO: 11789 - DNA, 20 bp, Homo Sapiens
atgaagatatcacaaaagat

SEQ ID NO: 11790 - DNA, 20 bp, Homo Sapiens
tgaagatatcacaaaagata

SEQ ID NO: 11791 - DNA, 20 bp, Homo Sapiens
gaagatatcacaaaagataa

SEQ ID NO: 11792 - DNA, 20 bp, Homo Sapiens
aagatatcacaaaagataaa

SEQ ID NO: 11793 - DNA, 20 bp, Homo Sapiens
agatatcacaaaagataaaa

SEQ ID NO: 11794 - DNA, 20 bp, Homo Sapiens
gatatcacaaaagataaaac

SEQ ID NO: 11795 - DNA, 20 bp, Homo Sapiens
atatcacaaaagataaaacc

SEQ ID NO: 11796 - DNA, 20 bp, Homo Sapiens
tatcacaaaagataaaacca

SEQ ID NO: 11797 - DNA, 20 bp, Homo Sapiens
atcacaaaagataaaaccag

SEQ ID NO: 11798 - DNA, 20 bp, Homo Sapiens
tcacaaaagataaaaccagc

SEQ ID NO: 11799 - DNA, 20 bp, Homo Sapiens
cacaaaagataaaaccagca

SEQ ID NO: 11800 - DNA, 20 bp, Homo Sapiens
acaaaagataaaaccagcac

SEQ ID NO: 11801 - DNA, 20 bp, Homo Sapiens
caaaagataaaaccagcaca

SEQ ID NO: 11802 - DNA, 20 bp, Homo Sapiens
aaaagataaaaccagcacag

SEQ ID NO: 11803 - DNA, 20 bp, Homo Sapiens
aaagataaaaccagcacagt

SEQ ID NO: 11804 - DNA, 20 bp, Homo Sapiens
aagataaaaccagcacagtg

SEQ ID NO: 11805 - DNA, 20 bp, Homo Sapiens
agataaaaccagcacagtgg

SEQ ID NO: 11806 - DNA, 20 bp, Homo Sapiens
gataaaaccagcacagtgga

SEQ ID NO: 11807 - DNA, 20 bp, Homo Sapiens
ataaaaccagcacagtggag

SEQ ID NO: 11808 - DNA, 20 bp, Homo Sapiens
taaaaccagcacagtggagg

SEQ ID NO: 11809 - DNA, 20 bp, Homo Sapiens
aaaaccagcacagtggaggc

SEQ ID NO: 11810 - DNA, 20 bp, Homo Sapiens
aaaccagcacagtggaggcc

SEQ ID NO: 11811 - DNA, 20 bp, Homo Sapiens
aaccagcacagtggaggcct

SEQ ID NO: 11812 - DNA, 20 bp, Homo Sapiens
accagcacagtggaggcctg

SEQ ID NO: 11813 - DNA, 20 bp, Homo Sapiens
ccagcacagtggaggcctgt

SEQ ID NO: 11814 - DNA, 20 bp, Homo Sapiens
cagcacagtggaggcctgtt

SEQ ID NO: 11815 - DNA, 20 bp, Homo Sapiens
agcacagtggaggcctgttt

SEQ ID NO: 11816 - DNA, 20 bp, Homo Sapiens
gcacagtggaggcctgttta

SEQ ID NO: 11817 - DNA, 20 bp, Homo Sapiens
cacagtggaggcctgtttac

SEQ ID NO: 11818 - DNA, 20 bp, Homo Sapiens
acagtggaggcctgtttacc

SEQ ID NO: 11819 - DNA, 20 bp, Homo Sapiens
cagtggaggcctgtttacca

SEQ ID NO: 11820 - DNA, 20 bp, Homo Sapiens
agtggaggcctgtttaccat

SEQ ID NO: 11821 - DNA, 20 bp, Homo Sapiens
gtggaggcctgtttaccatt

SEQ ID NO: 11822 - DNA, 20 bp, Homo Sapiens
tggaggcctgtttaccattg

SEQ ID NO: 11823 - DNA, 20 bp, Homo Sapiens
ggaggcctgtttaccattgg

SEQ ID NO: 11824 - DNA, 20 bp, Homo Sapiens
gaggcctgtttaccattgga

SEQ ID NO: 11825 - DNA, 20 bp, Homo Sapiens
aggcctgtttaccattggaa

SEQ ID NO: 11826 - DNA, 20 bp, Homo Sapiens
ggcctgtttaccattggaat

SEQ ID NO: 11827 - DNA, 20 bp, Homo Sapiens
gcctgtttaccattggaatt

SEQ ID NO: 11828 - DNA, 20 bp, Homo Sapiens
cctgtttaccattggaatta

SEQ ID NO: 11829 - DNA, 20 bp, Homo Sapiens
ctgtttaccattggaattaa

SEQ ID NO: 11830 - DNA, 20 bp, Homo Sapiens
tgtttaccattggaattaac

SEQ ID NO: 11831 - DNA, 20 bp, Homo Sapiens
gtttaccattggaattaacc

SEQ ID NO: 11832 - DNA, 20 bp, Homo Sapiens
tttaccattggaattaacca

SEQ ID NO: 11833 - DNA, 20 bp, Homo Sapiens
ttaccattggaattaaccaa

SEQ ID NO: 11834 - DNA, 20 bp, Homo Sapiens
taccattggaattaaccaag

SEQ ID NO: 11835 - DNA, 20 bp, Homo Sapiens
accattggaattaaccaaga

SEQ ID NO: 11836 - DNA, 20 bp, Homo Sapiens
ccattggaattaaccaagaa

SEQ ID NO: 11837 - DNA, 20 bp, Homo Sapiens
cattggaattaaccaagaat

SEQ ID NO: 11838 - DNA, 20 bp, Homo Sapiens
attggaattaaccaagaatg

SEQ ID NO: 11839 - DNA, 20 bp, Homo Sapiens
ttggaattaaccaagaatga

SEQ ID NO: 11840 - DNA, 20 bp, Homo Sapiens
tggaattaaccaagaatgag

SEQ ID NO: 11841 - DNA, 20 bp, Homo Sapiens
ggaattaaccaagaatgaga

SEQ ID NO: 11842 - DNA, 20 bp, Homo Sapiens
gaattaaccaagaatgagag

SEQ ID NO: 11843 - DNA, 20 bp, Homo Sapiens
aattaaccaagaatgagagt

SEQ ID NO: 11844 - DNA, 20 bp, Homo Sapiens
attaaccaagaatgagagtt

SEQ ID NO: 11845 - DNA, 20 bp, Homo Sapiens
ttaaccaagaatgagagttg

SEQ ID NO: 11846 - DNA, 20 bp, Homo Sapiens
taaccaagaatgagagttgc

SEQ ID NO: 11847 - DNA, 20 bp, Homo Sapiens
aaccaagaatgagagttgcc

SEQ ID NO: 11848 - DNA, 20 bp, Homo Sapiens
accaagaatgagagttgcct

SEQ ID NO: 11849 - DNA, 20 bp, Homo Sapiens
ccaagaatgagagttgccta

SEQ ID NO: 11850 - DNA, 20 bp, Homo Sapiens
caagaatgagagttgcctaa

SEQ ID NO: 11851 - DNA, 20 bp, Homo Sapiens
aagaatgagagttgcctaaa

SEQ ID NO: 11852 - DNA, 20 bp, Homo Sapiens
agaatgagagttgcctaaat

SEQ ID NO: 11853 - DNA, 20 bp, Homo Sapiens
gaatgagagttgcctaaatt

SEQ ID NO: 11854 - DNA, 20 bp, Homo Sapiens
aatgagagttgcctaaattc

SEQ ID NO: 11855 - DNA, 20 bp, Homo Sapiens
atgagagttgcctaaattcc

SEQ ID NO: 11856 - DNA, 20 bp, Homo Sapiens
tgagagttgcctaaattcca

SEQ ID NO: 11857 - DNA, 20 bp, Homo Sapiens
gagagttgcctaaattccag

SEQ ID NO: 11858 - DNA, 20 bp, Homo Sapiens
agagttgcctaaattccaga

SEQ ID NO: 11859 - DNA, 20 bp, Homo Sapiens
gagttgcctaaattccagag

SEQ ID NO: 11860 - DNA, 20 bp, Homo Sapiens
agttgcctaaattccagaga

SEQ ID NO: 11861 - DNA, 20 bp, Homo Sapiens
gttgcctaaattccagagag

SEQ ID NO: 11862 - DNA, 20 bp, Homo Sapiens
ttgcctaaattccagagaga

SEQ ID NO: 11863 - DNA, 20 bp, Homo Sapiens
tgcctaaattccagagagac

SEQ ID NO: 11864 - DNA, 20 bp, Homo Sapiens
gcctaaattccagagagacc

SEQ ID NO: 11865 - DNA, 20 bp, Homo Sapiens
cctaaattccagagagacct

SEQ ID NO: 11866 - DNA, 20 bp, Homo Sapiens
ctaaattccagagagacctc

SEQ ID NO: 11867 - DNA, 20 bp, Homo Sapiens
taaattccagagagacctct

SEQ ID NO: 11868 - DNA, 20 bp, Homo Sapiens
aaattccagagagacctctt

SEQ ID NO: 11869 - DNA, 20 bp, Homo Sapiens
aattccagagagacctcttt

SEQ ID NO: 11870 - DNA, 20 bp, Homo Sapiens
attccagagagacctctttc

SEQ ID NO: 11871 - DNA, 20 bp, Homo Sapiens
ttccagagagacctctttca

SEQ ID NO: 11872 - DNA, 20 bp, Homo Sapiens
tccagagagacctctttcat

SEQ ID NO: 11873 - DNA, 20 bp, Homo Sapiens
ccagagagacctctttcata

SEQ ID NO: 11874 - DNA, 20 bp, Homo Sapiens
cagagagacctctttcataa

SEQ ID NO: 11875 - DNA, 20 bp, Homo Sapiens
agagagacctctttcataac

SEQ ID NO: 11876 - DNA, 20 bp, Homo Sapiens
gagagacctctttcataact

SEQ ID NO: 11877 - DNA, 20 bp, Homo Sapiens
agagacctctttcataacta

SEQ ID NO: 11878 - DNA, 20 bp, Homo Sapiens
gagacctctttcataactaa

SEQ ID NO: 11879 - DNA, 20 bp, Homo Sapiens
agacctctttcataactaat

SEQ ID NO: 11880 - DNA, 20 bp, Homo Sapiens
gacctctttcataactaatg

SEQ ID NO: 11881 - DNA, 20 bp, Homo Sapiens
acctctttcataactaatgg

SEQ ID NO: 11882 - DNA, 20 bp, Homo Sapiens
cctctttcataactaatggg

SEQ ID NO: 11883 - DNA, 20 bp, Homo Sapiens
ctctttcataactaatggga

SEQ ID NO: 11884 - DNA, 20 bp, Homo Sapiens
tctttcataactaatgggag

SEQ ID NO: 11885 - DNA, 20 bp, Homo Sapiens
ctttcataactaatgggagt

SEQ ID NO: 11886 - DNA, 20 bp, Homo Sapiens
tttcataactaatgggagtt

SEQ ID NO: 11887 - DNA, 20 bp, Homo Sapiens
ttcataactaatgggagttg

SEQ ID NO: 11888 - DNA, 20 bp, Homo Sapiens
tcataactaatgggagttgc

SEQ ID NO: 11889 - DNA, 20 bp, Homo Sapiens
cataactaatgggagttgcc

SEQ ID NO: 11890 - DNA, 20 bp, Homo Sapiens
ataactaatgggagttgcct

SEQ ID NO: 11891 - DNA, 20 bp, Homo Sapiens
taactaatgggagttgcctg

SEQ ID NO: 11892 - DNA, 20 bp, Homo Sapiens
aactaatgggagttgcctgg

SEQ ID NO: 11893 - DNA, 20 bp, Homo Sapiens
actaatgggagttgcctggc

SEQ ID NO: 11894 - DNA, 20 bp, Homo Sapiens
ctaatgggagttgcctggcc

SEQ ID NO: 11895 - DNA, 20 bp, Homo Sapiens
taatgggagttgcctggcct

SEQ ID NO: 11896 - DNA, 20 bp, Homo Sapiens
aatgggagttgcctggcctc

SEQ ID NO: 11897 - DNA, 20 bp, Homo Sapiens
atgggagttgcctggcctcc

SEQ ID NO: 11898 - DNA, 20 bp, Homo Sapiens
tgggagttgcctggcctcca

SEQ ID NO: 11899 - DNA, 20 bp, Homo Sapiens
gggagttgcctggcctccag

SEQ ID NO: 11900 - DNA, 20 bp, Homo Sapiens
ggagttgcctggcctccaga

SEQ ID NO: 11901 - DNA, 20 bp, Homo Sapiens
gagttgcctggcctccagaa

SEQ ID NO: 11902 - DNA, 20 bp, Homo Sapiens
agttgcctggcctccagaaa

SEQ ID NO: 11903 - DNA, 20 bp, Homo Sapiens
gttgcctggcctccagaaag

SEQ ID NO: 11904 - DNA, 20 bp, Homo Sapiens
ttgcctggcctccagaaaga

SEQ ID NO: 11905 - DNA, 20 bp, Homo Sapiens
tgcctggcctccagaaagac

SEQ ID NO: 11906 - DNA, 20 bp, Homo Sapiens
gcctggcctccagaaagacc

SEQ ID NO: 11907 - DNA, 20 bp, Homo Sapiens
cctggcctccagaaagacct

SEQ ID NO: 11908 - DNA, 20 bp, Homo Sapiens
ctggcctccagaaagacctc

SEQ ID NO: 11909 - DNA, 20 bp, Homo Sapiens
tggcctccagaaagacctct

SEQ ID NO: 11910 - DNA, 20 bp, Homo Sapiens
ggcctccagaaagacctctt

SEQ ID NO: 11911 - DNA, 20 bp, Homo Sapiens
gcctccagaaagacctcttt

SEQ ID NO: 11912 - DNA, 20 bp, Homo Sapiens
cctccagaaagacctctttt

SEQ ID NO: 11913 - DNA, 20 bp, Homo Sapiens
ctccagaaagacctctttta

SEQ ID NO: 11914 - DNA, 20 bp, Homo Sapiens
tccagaaagacctcttttat

SEQ ID NO: 11915 - DNA, 20 bp, Homo Sapiens
ccagaaagacctcttttatg

SEQ ID NO: 11916 - DNA, 20 bp, Homo Sapiens
cagaaagacctcttttatga

SEQ ID NO: 11917 - DNA, 20 bp, Homo Sapiens
agaaagacctcttttatgat

SEQ ID NO: 11918 - DNA, 20 bp, Homo Sapiens
gaaagacctcttttatgatg

SEQ ID NO: 11919 - DNA, 20 bp, Homo Sapiens
aaagacctcttttatgatgg

SEQ ID NO: 11920 - DNA, 20 bp, Homo Sapiens
aagacctcttttatgatggc

SEQ ID NO: 11921 - DNA, 20 bp, Homo Sapiens
agacctcttttatgatggcc

SEQ ID NO: 11922 - DNA, 20 bp, Homo Sapiens
gacctcttttatgatggccc

SEQ ID NO: 11923 - DNA, 20 bp, Homo Sapiens
acctcttttatgatggccct

SEQ ID NO: 11924 - DNA, 20 bp, Homo Sapiens
cctcttttatgatggccctg

SEQ ID NO: 11925 - DNA, 20 bp, Homo Sapiens
ctcttttatgatggccctgt

SEQ ID NO: 11926 - DNA, 20 bp, Homo Sapiens
tcttttatgatggccctgtg

SEQ ID NO: 11927 - DNA, 20 bp, Homo Sapiens
cttttatgatggccctgtgc

SEQ ID NO: 11928 - DNA, 20 bp, Homo Sapiens
ttttatgatggccctgtgcc

SEQ ID NO: 11929 - DNA, 20 bp, Homo Sapiens
tttatgatggccctgtgcct

SEQ ID NO: 11930 - DNA, 20 bp, Homo Sapiens
ttatgatggccctgtgcctt

SEQ ID NO: 11931 - DNA, 20 bp, Homo Sapiens
tatgatggccctgtgcctta

SEQ ID NO: 11932 - DNA, 20 bp, Homo Sapiens
atgatggccctgtgccttag

SEQ ID NO: 11933 - DNA, 20 bp, Homo Sapiens
tgatggccctgtgccttagt

SEQ ID NO: 11934 - DNA, 20 bp, Homo Sapiens
gatggccctgtgccttagta

SEQ ID NO: 11935 - DNA, 20 bp, Homo Sapiens
atggccctgtgccttagtag

SEQ ID NO: 11936 - DNA, 20 bp, Homo Sapiens
tggccctgtgccttagtagt

SEQ ID NO: 11937 - DNA, 20 bp, Homo Sapiens
ggccctgtgccttagtagta

SEQ ID NO: 11938 - DNA, 20 bp, Homo Sapiens
gccctgtgccttagtagtat

SEQ ID NO: 11939 - DNA, 20 bp, Homo Sapiens
ccctgtgccttagtagtatt

SEQ ID NO: 11940 - DNA, 20 bp, Homo Sapiens
cctgtgccttagtagtattt

SEQ ID NO: 11941 - DNA, 20 bp, Homo Sapiens
ctgtgccttagtagtattta

SEQ ID NO: 11942 - DNA, 20 bp, Homo Sapiens
tgtgccttagtagtatttat

SEQ ID NO: 11943 - DNA, 20 bp, Homo Sapiens
gtgccttagtagtatttatg

SEQ ID NO: 11944 - DNA, 20 bp, Homo Sapiens
tgccttagtagtatttatga

SEQ ID NO: 11945 - DNA, 20 bp, Homo Sapiens
gccttagtagtatttatgaa

SEQ ID NO: 11946 - DNA, 20 bp, Homo Sapiens
ccttagtagtatttatgaag

SEQ ID NO: 11947 - DNA, 20 bp, Homo Sapiens
cttagtagtatttatgaaga

SEQ ID NO: 11948 - DNA, 20 bp, Homo Sapiens
ttagtagtatttatgaagac

SEQ ID NO: 11949 - DNA, 20 bp, Homo Sapiens
tagtagtatttatgaagact

SEQ ID NO: 11950 - DNA, 20 bp, Homo Sapiens
agtagtatttatgaagactt

SEQ ID NO: 11951 - DNA, 20 bp, Homo Sapiens
gtagtatttatgaagacttg

SEQ ID NO: 11952 - DNA, 20 bp, Homo Sapiens
tagtatttatgaagacttga

SEQ ID NO: 11953 - DNA, 20 bp, Homo Sapiens
agtatttatgaagacttgaa

SEQ ID NO: 11954 - DNA, 20 bp, Homo Sapiens
gtatttatgaagacttgaag

SEQ ID NO: 11955 - DNA, 20 bp, Homo Sapiens
tatttatgaagacttgaaga

SEQ ID NO: 11956 - DNA, 20 bp, Homo Sapiens
atttatgaagacttgaagat

SEQ ID NO: 11957 - DNA, 20 bp, Homo Sapiens
tttatgaagacttgaagatg

SEQ ID NO: 11958 - DNA, 20 bp, Homo Sapiens
ttatgaagacttgaagatgt

SEQ ID NO: 11959 - DNA, 20 bp, Homo Sapiens
tatgaagacttgaagatgta

SEQ ID NO: 11960 - DNA, 20 bp, Homo Sapiens
atgaagacttgaagatgtac

SEQ ID NO: 11961 - DNA, 20 bp, Homo Sapiens
tgaagacttgaagatgtacc

SEQ ID NO: 11962 - DNA, 20 bp, Homo Sapiens
gaagacttgaagatgtacca

SEQ ID NO: 11963 - DNA, 20 bp, Homo Sapiens
aagacttgaagatgtaccag

SEQ ID NO: 11964 - DNA, 20 bp, Homo Sapiens
agacttgaagatgtaccagg

SEQ ID NO: 11965 - DNA, 20 bp, Homo Sapiens
gacttgaagatgtaccaggt

SEQ ID NO: 11966 - DNA, 20 bp, Homo Sapiens
acttgaagatgtaccaggtg

SEQ ID NO: 11967 - DNA, 20 bp, Homo Sapiens
cttgaagatgtaccaggtgg

SEQ ID NO: 11968 - DNA, 20 bp, Homo Sapiens
ttgaagatgtaccaggtgga

SEQ ID NO: 11969 - DNA, 20 bp, Homo Sapiens
tgaagatgtaccaggtggag

SEQ ID NO: 11970 - DNA, 20 bp, Homo Sapiens
gaagatgtaccaggtggagt

SEQ ID NO: 11971 - DNA, 20 bp, Homo Sapiens
aagatgtaccaggtggagtt

SEQ ID NO: 11972 - DNA, 20 bp, Homo Sapiens
agatgtaccaggtggagttc

SEQ ID NO: 11973 - DNA, 20 bp, Homo Sapiens
gatgtaccaggtggagttca

SEQ ID NO: 11974 - DNA, 20 bp, Homo Sapiens
atgtaccaggtggagttcaa

SEQ ID NO: 11975 - DNA, 20 bp, Homo Sapiens
tgtaccaggtggagttcaag

SEQ ID NO: 11976 - DNA, 20 bp, Homo Sapiens
gtaccaggtggagttcaaga

SEQ ID NO: 11977 - DNA, 20 bp, Homo Sapiens
taccaggtggagttcaagac

SEQ ID NO: 11978 - DNA, 20 bp, Homo Sapiens
accaggtggagttcaagacc

SEQ ID NO: 11979 - DNA, 20 bp, Homo Sapiens
ccaggtggagttcaagacca

SEQ ID NO: 11980 - DNA, 20 bp, Homo Sapiens
caggtggagttcaagaccat

SEQ ID NO: 11981 - DNA, 20 bp, Homo Sapiens
aggtggagttcaagaccatg

SEQ ID NO: 11982 - DNA, 20 bp, Homo Sapiens
ggtggagttcaagaccatga

SEQ ID NO: 11983 - DNA, 20 bp, Homo Sapiens
gtggagttcaagaccatgaa

SEQ ID NO: 11984 - DNA, 20 bp, Homo Sapiens
tggagttcaagaccatgaat

SEQ ID NO: 11985 - DNA, 20 bp, Homo Sapiens
ggagttcaagaccatgaatg

SEQ ID NO: 11986 - DNA, 20 bp, Homo Sapiens
gagttcaagaccatgaatgc

SEQ ID NO: 11987 - DNA, 20 bp, Homo Sapiens
agttcaagaccatgaatgca

SEQ ID NO: 11988 - DNA, 20 bp, Homo Sapiens
gttcaagaccatgaatgcaa

SEQ ID NO: 11989 - DNA, 20 bp, Homo Sapiens
ttcaagaccatgaatgcaaa

SEQ ID NO: 11990 - DNA, 20 bp, Homo Sapiens
tcaagaccatgaatgcaaag

SEQ ID NO: 11991 - DNA, 20 bp, Homo Sapiens
caagaccatgaatgcaaagc

SEQ ID NO: 11992 - DNA, 20 bp, Homo Sapiens
aagaccatgaatgcaaagct

SEQ ID NO: 11993 - DNA, 20 bp, Homo Sapiens
agaccatgaatgcaaagctt

SEQ ID NO: 11994 - DNA, 20 bp, Homo Sapiens
gaccatgaatgcaaagcttc

SEQ ID NO: 11995 - DNA, 20 bp, Homo Sapiens
accatgaatgcaaagcttct

SEQ ID NO: 11996 - DNA, 20 bp, Homo Sapiens
ccatgaatgcaaagcttctg

SEQ ID NO: 11997 - DNA, 20 bp, Homo Sapiens
catgaatgcaaagcttctga

SEQ ID NO: 11998 - DNA, 20 bp, Homo Sapiens
atgaatgcaaagcttctgat

SEQ ID NO: 11999 - DNA, 20 bp, Homo Sapiens
tgaatgcaaagcttctgatg

SEQ ID NO: 12000 - DNA, 20 bp, Homo Sapiens
gaatgcaaagcttctgatgg

SEQ ID NO: 12001 - DNA, 20 bp, Homo Sapiens
aatgcaaagcttctgatgga

SEQ ID NO: 12002 - DNA, 20 bp, Homo Sapiens
atgcaaagcttctgatggat

SEQ ID NO: 12003 - DNA, 20 bp, Homo Sapiens
tgcaaagcttctgatggatc

SEQ ID NO: 12004 - DNA, 20 bp, Homo Sapiens
gcaaagcttctgatggatcc

SEQ ID NO: 12005 - DNA, 20 bp, Homo Sapiens
caaagcttctgatggatcct

SEQ ID NO: 12006 - DNA, 20 bp, Homo Sapiens
aaagcttctgatggatccta

SEQ ID NO: 12007 - DNA, 20 bp, Homo Sapiens
aagcttctgatggatcctaa

SEQ ID NO: 12008 - DNA, 20 bp, Homo Sapiens
agcttctgatggatcctaag

SEQ ID NO: 12009 - DNA, 20 bp, Homo Sapiens
gcttctgatggatcctaaga

SEQ ID NO: 12010 - DNA, 20 bp, Homo Sapiens
cttctgatggatcctaagag

SEQ ID NO: 12011 - DNA, 20 bp, Homo Sapiens
ttctgatggatcctaagagg

SEQ ID NO: 12012 - DNA, 20 bp, Homo Sapiens
tctgatggatcctaagaggc

SEQ ID NO: 12013 - DNA, 20 bp, Homo Sapiens
ctgatggatcctaagaggca

SEQ ID NO: 12014 - DNA, 20 bp, Homo Sapiens
tgatggatcctaagaggcag

SEQ ID NO: 12015 - DNA, 20 bp, Homo Sapiens
gatggatcctaagaggcaga

SEQ ID NO: 12016 - DNA, 20 bp, Homo Sapiens
atggatcctaagaggcagat

SEQ ID NO: 12017 - DNA, 20 bp, Homo Sapiens
tggatcctaagaggcagatc

SEQ ID NO: 12018 - DNA, 20 bp, Homo Sapiens
ggatcctaagaggcagatct

SEQ ID NO: 12019 - DNA, 20 bp, Homo Sapiens
gatcctaagaggcagatctt

SEQ ID NO: 12020 - DNA, 20 bp, Homo Sapiens
atcctaagaggcagatcttt

SEQ ID NO: 12021 - DNA, 20 bp, Homo Sapiens
tcctaagaggcagatctttc

SEQ ID NO: 12022 - DNA, 20 bp, Homo Sapiens
cctaagaggcagatctttct

SEQ ID NO: 12023 - DNA, 20 bp, Homo Sapiens
ctaagaggcagatctttcta

SEQ ID NO: 12024 - DNA, 20 bp, Homo Sapiens
taagaggcagatctttctag

SEQ ID NO: 12025 - DNA, 20 bp, Homo Sapiens
aagaggcagatctttctaga

SEQ ID NO: 12026 - DNA, 20 bp, Homo Sapiens
agaggcagatctttctagat

SEQ ID NO: 12027 - DNA, 20 bp, Homo Sapiens
gaggcagatctttctagatc

SEQ ID NO: 12028 - DNA, 20 bp, Homo Sapiens
aggcagatctttctagatca

SEQ ID NO: 12029 - DNA, 20 bp, Homo Sapiens
ggcagatctttctagatcaa

SEQ ID NO: 12030 - DNA, 20 bp, Homo Sapiens
gcagatctttctagatcaaa

SEQ ID NO: 12031 - DNA, 20 bp, Homo Sapiens
cagatctttctagatcaaaa

SEQ ID NO: 12032 - DNA, 20 bp, Homo Sapiens
agatctttctagatcaaaac

SEQ ID NO: 12033 - DNA, 20 bp, Homo Sapiens
gatctttctagatcaaaaca

SEQ ID NO: 12034 - DNA, 20 bp, Homo Sapiens
atctttctagatcaaaacat

SEQ ID NO: 12035 - DNA, 20 bp, Homo Sapiens
tctttctagatcaaaacatg

SEQ ID NO: 12036 - DNA, 20 bp, Homo Sapiens
ctttctagatcaaaacatgc

SEQ ID NO: 12037 - DNA, 20 bp, Homo Sapiens
tttctagatcaaaacatgct

SEQ ID NO: 12038 - DNA, 20 bp, Homo Sapiens
ttctagatcaaaacatgctg

SEQ ID NO: 12039 - DNA, 20 bp, Homo Sapiens
tctagatcaaaacatgctgg

SEQ ID NO: 12040 - DNA, 20 bp, Homo Sapiens
ctagatcaaaacatgctggc

SEQ ID NO: 12041 - DNA, 20 bp, Homo Sapiens
tagatcaaaacatgctggca

SEQ ID NO: 12042 - DNA, 20 bp, Homo Sapiens
agatcaaaacatgctggcag

SEQ ID NO: 12043 - DNA, 20 bp, Homo Sapiens
gatcaaaacatgctggcagt

SEQ ID NO: 12044 - DNA, 20 bp, Homo Sapiens
atcaaaacatgctggcagtt

SEQ ID NO: 12045 - DNA, 20 bp, Homo Sapiens
tcaaaacatgctggcagtta

SEQ ID NO: 12046 - DNA, 20 bp, Homo Sapiens
caaaacatgctggcagttat

SEQ ID NO: 12047 - DNA, 20 bp, Homo Sapiens
aaaacatgctggcagttatt

SEQ ID NO: 12048 - DNA, 20 bp, Homo Sapiens
aaacatgctggcagttattg

SEQ ID NO: 12049 - DNA, 20 bp, Homo Sapiens
aacatgctggcagttattga

SEQ ID NO: 12050 - DNA, 20 bp, Homo Sapiens
acatgctggcagttattgat

SEQ ID NO: 12051 - DNA, 20 bp, Homo Sapiens
catgctggcagttattgatg

SEQ ID NO: 12052 - DNA, 20 bp, Homo Sapiens
atgctggcagttattgatga

SEQ ID NO: 12053 - DNA, 20 bp, Homo Sapiens
tgctggcagttattgatgag

SEQ ID NO: 12054 - DNA, 20 bp, Homo Sapiens
gctggcagttattgatgagc

SEQ ID NO: 12055 - DNA, 20 bp, Homo Sapiens
ctggcagttattgatgagct

SEQ ID NO: 12056 - DNA, 20 bp, Homo Sapiens
tggcagttattgatgagctg

SEQ ID NO: 12057 - DNA, 20 bp, Homo Sapiens
ggcagttattgatgagctga

SEQ ID NO: 12058 - DNA, 20 bp, Homo Sapiens
gcagttattgatgagctgat

SEQ ID NO: 12059 - DNA, 20 bp, Homo Sapiens
cagttattgatgagctgatg

SEQ ID NO: 12060 - DNA, 20 bp, Homo Sapiens
agttattgatgagctgatgc

SEQ ID NO: 12061 - DNA, 20 bp, Homo Sapiens
gttattgatgagctgatgca

SEQ ID NO: 12062 - DNA, 20 bp, Homo Sapiens
ttattgatgagctgatgcag

SEQ ID NO: 12063 - DNA, 20 bp, Homo Sapiens
tattgatgagctgatgcagg

SEQ ID NO: 12064 - DNA, 20 bp, Homo Sapiens
attgatgagctgatgcaggc

SEQ ID NO: 12065 - DNA, 20 bp, Homo Sapiens
ttgatgagctgatgcaggcc

SEQ ID NO: 12066 - DNA, 20 bp, Homo Sapiens
tgatgagctgatgcaggccc

SEQ ID NO: 12067 - DNA, 20 bp, Homo Sapiens
gatgagctgatgcaggccct

SEQ ID NO: 12068 - DNA, 20 bp, Homo Sapiens
atgagctgatgcaggccctg

SEQ ID NO: 12069 - DNA, 20 bp, Homo Sapiens
tgagctgatgcaggccctga

SEQ ID NO: 12070 - DNA, 20 bp, Homo Sapiens
gagctgatgcaggccctgaa

SEQ ID NO: 12071 - DNA, 20 bp, Homo Sapiens
agctgatgcaggccctgaat

SEQ ID NO: 12072 - DNA, 20 bp, Homo Sapiens
gctgatgcaggccctgaatt

SEQ ID NO: 12073 - DNA, 20 bp, Homo Sapiens
ctgatgcaggccctgaattt

SEQ ID NO: 12074 - DNA, 20 bp, Homo Sapiens
tgatgcaggccctgaatttc

SEQ ID NO: 12075 - DNA, 20 bp, Homo Sapiens
gatgcaggccctgaatttca

SEQ ID NO: 12076 - DNA, 20 bp, Homo Sapiens
atgcaggccctgaatttcaa

SEQ ID NO: 12077 - DNA, 20 bp, Homo Sapiens
tgcaggccctgaatttcaac

SEQ ID NO: 12078 - DNA, 20 bp, Homo Sapiens
gcaggccctgaatttcaaca

SEQ ID NO: 12079 - DNA, 20 bp, Homo Sapiens
caggccctgaatttcaacag

SEQ ID NO: 12080 - DNA, 20 bp, Homo Sapiens
aggccctgaatttcaacagt

SEQ ID NO: 12081 - DNA, 20 bp, Homo Sapiens
ggccctgaatttcaacagtg

SEQ ID NO: 12082 - DNA, 20 bp, Homo Sapiens
gccctgaatttcaacagtga

SEQ ID NO: 12083 - DNA, 20 bp, Homo Sapiens
ccctgaatttcaacagtgag

SEQ ID NO: 12084 - DNA, 20 bp, Homo Sapiens
cctgaatttcaacagtgaga

SEQ ID NO: 12085 - DNA, 20 bp, Homo Sapiens
ctgaatttcaacagtgagac

SEQ ID NO: 12086 - DNA, 20 bp, Homo Sapiens
tgaatttcaacagtgagact

SEQ ID NO: 12087 - DNA, 20 bp, Homo Sapiens
gaatttcaacagtgagactg

SEQ ID NO: 12088 - DNA, 20 bp, Homo Sapiens
aatttcaacagtgagactgt

SEQ ID NO: 12089 - DNA, 20 bp, Homo Sapiens
atttcaacagtgagactgtg

SEQ ID NO: 12090 - DNA, 20 bp, Homo Sapiens
tttcaacagtgagactgtgc

SEQ ID NO: 12091 - DNA, 20 bp, Homo Sapiens
ttcaacagtgagactgtgcc

SEQ ID NO: 12092 - DNA, 20 bp, Homo Sapiens
tcaacagtgagactgtgcca

SEQ ID NO: 12093 - DNA, 20 bp, Homo Sapiens
caacagtgagactgtgccac

SEQ ID NO: 12094 - DNA, 20 bp, Homo Sapiens
aacagtgagactgtgccaca

SEQ ID NO: 12095 - DNA, 20 bp, Homo Sapiens
acagtgagactgtgccacaa

SEQ ID NO: 12096 - DNA, 20 bp, Homo Sapiens
cagtgagactgtgccacaaa

SEQ ID NO: 12097 - DNA, 20 bp, Homo Sapiens
agtgagactgtgccacaaaa

SEQ ID NO: 12098 - DNA, 20 bp, Homo Sapiens
gtgagactgtgccacaaaaa

SEQ ID NO: 12099 - DNA, 20 bp, Homo Sapiens
tgagactgtgccacaaaaat

SEQ ID NO: 12100 - DNA, 20 bp, Homo Sapiens
gagactgtgccacaaaaatc

SEQ ID NO: 12101 - DNA, 20 bp, Homo Sapiens
agactgtgccacaaaaatcc

SEQ ID NO: 12102 - DNA, 20 bp, Homo Sapiens
gactgtgccacaaaaatcct

SEQ ID NO: 12103 - DNA, 20 bp, Homo Sapiens
actgtgccacaaaaatcctc

SEQ ID NO: 12104 - DNA, 20 bp, Homo Sapiens
ctgtgccacaaaaatcctcc

SEQ ID NO: 12105 - DNA, 20 bp, Homo Sapiens
tgtgccacaaaaatcctccc

SEQ ID NO: 12106 - DNA, 20 bp, Homo Sapiens
gtgccacaaaaatcctccct

SEQ ID NO: 12107 - DNA, 20 bp, Homo Sapiens
tgccacaaaaatcctccctt

SEQ ID NO: 12108 - DNA, 20 bp, Homo Sapiens
gccacaaaaatcctcccttg

SEQ ID NO: 12109 - DNA, 20 bp, Homo Sapiens
ccacaaaaatcctcccttga

SEQ ID NO: 12110 - DNA, 20 bp, Homo Sapiens
cacaaaaatcctcccttgaa

SEQ ID NO: 12111 - DNA, 20 bp, Homo Sapiens
acaaaaatcctcccttgaag

SEQ ID NO: 12112 - DNA, 20 bp, Homo Sapiens
caaaaatcctcccttgaaga

SEQ ID NO: 12113 - DNA, 20 bp, Homo Sapiens
aaaaatcctcccttgaagaa

SEQ ID NO: 12114 - DNA, 20 bp, Homo Sapiens
aaaatcctcccttgaagaac

SEQ ID NO: 12115 - DNA, 20 bp, Homo Sapiens
aaatcctcccttgaagaacc

SEQ ID NO: 12116 - DNA, 20 bp, Homo Sapiens
aatcctcccttgaagaaccg

SEQ ID NO: 12117 - DNA, 20 bp, Homo Sapiens
atcctcccttgaagaaccgg

SEQ ID NO: 12118 - DNA, 20 bp, Homo Sapiens
tcctcccttgaagaaccgga

SEQ ID NO: 12119 - DNA, 20 bp, Homo Sapiens
cctcccttgaagaaccggat

SEQ ID NO: 12120 - DNA, 20 bp, Homo Sapiens
ctcccttgaagaaccggatt

SEQ ID NO: 12121 - DNA, 20 bp, Homo Sapiens
tcccttgaagaaccggattt

SEQ ID NO: 12122 - DNA, 20 bp, Homo Sapiens
cccttgaagaaccggatttt

SEQ ID NO: 12123 - DNA, 20 bp, Homo Sapiens
ccttgaagaaccggattttt

SEQ ID NO: 12124 - DNA, 20 bp, Homo Sapiens
cttgaagaaccggattttta

SEQ ID NO: 12125 - DNA, 20 bp, Homo Sapiens
ttgaagaaccggatttttat

SEQ ID NO: 12126 - DNA, 20 bp, Homo Sapiens
tgaagaaccggatttttata

SEQ ID NO: 12127 - DNA, 20 bp, Homo Sapiens
gaagaaccggatttttataa

SEQ ID NO: 12128 - DNA, 20 bp, Homo Sapiens
aagaaccggatttttataaa

SEQ ID NO: 12129 - DNA, 20 bp, Homo Sapiens
agaaccggatttttataaaa

SEQ ID NO: 12130 - DNA, 20 bp, Homo Sapiens
gaaccggatttttataaaac

SEQ ID NO: 12131 - DNA, 20 bp, Homo Sapiens
aaccggatttttataaaact

SEQ ID NO: 12132 - DNA, 20 bp, Homo Sapiens
accggatttttataaaacta

SEQ ID NO: 12133 - DNA, 20 bp, Homo Sapiens
ccggatttttataaaactaa

SEQ ID NO: 12134 - DNA, 20 bp, Homo Sapiens
cggatttttataaaactaaa

SEQ ID NO: 12135 - DNA, 20 bp, Homo Sapiens
ggatttttataaaactaaaa

SEQ ID NO: 12136 - DNA, 20 bp, Homo Sapiens
gatttttataaaactaaaat

SEQ ID NO: 12137 - DNA, 20 bp, Homo Sapiens
atttttataaaactaaaatc

SEQ ID NO: 12138 - DNA, 20 bp, Homo Sapiens
tttttataaaactaaaatca

SEQ ID NO: 12139 - DNA, 20 bp, Homo Sapiens
ttttataaaactaaaatcaa

SEQ ID NO: 12140 - DNA, 20 bp, Homo Sapiens
tttataaaactaaaatcaag

SEQ ID NO: 12141 - DNA, 20 bp, Homo Sapiens
ttataaaactaaaatcaagc

SEQ ID NO: 12142 - DNA, 20 bp, Homo Sapiens
tataaaactaaaatcaagct

SEQ ID NO: 12143 - DNA, 20 bp, Homo Sapiens
ataaaactaaaatcaagctc

SEQ ID NO: 12144 - DNA, 20 bp, Homo Sapiens
taaaactaaaatcaagctct

SEQ ID NO: 12145 - DNA, 20 bp, Homo Sapiens
aaaactaaaatcaagctctg

SEQ ID NO: 12146 - DNA, 20 bp, Homo Sapiens
aaactaaaatcaagctctgc

SEQ ID NO: 12147 - DNA, 20 bp, Homo Sapiens
aactaaaatcaagctctgca

SEQ ID NO: 12148 - DNA, 20 bp, Homo Sapiens
actaaaatcaagctctgcat

SEQ ID NO: 12149 - DNA, 20 bp, Homo Sapiens
ctaaaatcaagctctgcata

SEQ ID NO: 12150 - DNA, 20 bp, Homo Sapiens
taaaatcaagctctgcatac

SEQ ID NO: 12151 - DNA, 20 bp, Homo Sapiens
aaaatcaagctctgcatact

SEQ ID NO: 12152 - DNA, 20 bp, Homo Sapiens
aaatcaagctctgcatactt

SEQ ID NO: 12153 - DNA, 20 bp, Homo Sapiens
aatcaagctctgcatacttc

SEQ ID NO: 12154 - DNA, 20 bp, Homo Sapiens
atcaagctctgcatacttct

SEQ ID NO: 12155 - DNA, 20 bp, Homo Sapiens
tcaagctctgcatacttctt

SEQ ID NO: 12156 - DNA, 20 bp, Homo Sapiens
caagctctgcatacttcttc

SEQ ID NO: 12157 - DNA, 20 bp, Homo Sapiens
aagctctgcatacttcttca

SEQ ID NO: 12158 - DNA, 20 bp, Homo Sapiens
agctctgcatacttcttcat

SEQ ID NO: 12159 - DNA, 20 bp, Homo Sapiens
gctctgcatacttcttcatg

SEQ ID NO: 12160 - DNA, 20 bp, Homo Sapiens
ctctgcatacttcttcatgc

SEQ ID NO: 12161 - DNA, 20 bp, Homo Sapiens
tctgcatacttcttcatgct

SEQ ID NO: 12162 - DNA, 20 bp, Homo Sapiens
ctgcatacttcttcatgctt

SEQ ID NO: 12163 - DNA, 20 bp, Homo Sapiens
tgcatacttcttcatgcttt

SEQ ID NO: 12164 - DNA, 20 bp, Homo Sapiens
gcatacttcttcatgctttc

SEQ ID NO: 12165 - DNA, 20 bp, Homo Sapiens
catacttcttcatgctttca

SEQ ID NO: 12166 - DNA, 20 bp, Homo Sapiens
atacttcttcatgctttcag

SEQ ID NO: 12167 - DNA, 20 bp, Homo Sapiens
tacttcttcatgctttcaga

SEQ ID NO: 12168 - DNA, 20 bp, Homo Sapiens
acttcttcatgctttcagaa

SEQ ID NO: 12169 - DNA, 20 bp, Homo Sapiens
cttcttcatgctttcagaat

SEQ ID NO: 12170 - DNA, 20 bp, Homo Sapiens
ttcttcatgctttcagaatt

SEQ ID NO: 12171 - DNA, 20 bp, Homo Sapiens
tcttcatgctttcagaattc

SEQ ID NO: 12172 - DNA, 20 bp, Homo Sapiens
cttcatgctttcagaattcg

SEQ ID NO: 12173 - DNA, 20 bp, Homo Sapiens
ttcatgctttcagaattcgg

SEQ ID NO: 12174 - DNA, 20 bp, Homo Sapiens
tcatgctttcagaattcggg

SEQ ID NO: 12175 - DNA, 20 bp, Homo Sapiens
catgctttcagaattcgggc

SEQ ID NO: 12176 - DNA, 20 bp, Homo Sapiens
atgctttcagaattcgggca

SEQ ID NO: 12177 - DNA, 20 bp, Homo Sapiens
tgctttcagaattcgggcag

SEQ ID NO: 12178 - DNA, 20 bp, Homo Sapiens
gctttcagaattcgggcagt

SEQ ID NO: 12179 - DNA, 20 bp, Homo Sapiens
ctttcagaattcgggcagtg

SEQ ID NO: 12180 - DNA, 20 bp, Homo Sapiens
tttcagaattcgggcagtga

SEQ ID NO: 12181 - DNA, 20 bp, Homo Sapiens
ttcagaattcgggcagtgac

SEQ ID NO: 12182 - DNA, 20 bp, Homo Sapiens
tcagaattcgggcagtgact

SEQ ID NO: 12183 - DNA, 20 bp, Homo Sapiens
cagaattcgggcagtgacta

SEQ ID NO: 12184 - DNA, 20 bp, Homo Sapiens
agaattcgggcagtgactat

SEQ ID NO: 12185 - DNA, 20 bp, Homo Sapiens
gaattcgggcagtgactatt

SEQ ID NO: 12186 - DNA, 20 bp, Homo Sapiens
aattcgggcagtgactattg

SEQ ID NO: 12187 - DNA, 20 bp, Homo Sapiens
attcgggcagtgactattga

SEQ ID NO: 12188 - DNA, 20 bp, Homo Sapiens
ttcgggcagtgactattgat

SEQ ID NO: 12189 - DNA, 20 bp, Homo Sapiens
tcgggcagtgactattgata

SEQ ID NO: 12190 - DNA, 20 bp, Homo Sapiens
cgggcagtgactattgatag

SEQ ID NO: 12191 - DNA, 20 bp, Homo Sapiens
gggcagtgactattgataga

SEQ ID NO: 12192 - DNA, 20 bp, Homo Sapiens
ggcagtgactattgatagag

SEQ ID NO: 12193 - DNA, 20 bp, Homo Sapiens
gcagtgactattgatagagt

SEQ ID NO: 12194 - DNA, 20 bp, Homo Sapiens
cagtgactattgatagagtg

SEQ ID NO: 12195 - DNA, 20 bp, Homo Sapiens
agtgactattgatagagtga

SEQ ID NO: 12196 - DNA, 20 bp, Homo Sapiens
gtgactattgatagagtgat

SEQ ID NO: 12197 - DNA, 20 bp, Homo Sapiens
tgactattgatagagtgatg

SEQ ID NO: 12198 - DNA, 20 bp, Homo Sapiens
gactattgatagagtgatga

SEQ ID NO: 12199 - DNA, 20 bp, Homo Sapiens
actattgatagagtgatgag

SEQ ID NO: 12200 - DNA, 20 bp, Homo Sapiens
ctattgatagagtgatgagc

SEQ ID NO: 12201 - DNA, 20 bp, Homo Sapiens
tattgatagagtgatgagct

SEQ ID NO: 12202 - DNA, 20 bp, Homo Sapiens
attgatagagtgatgagcta

SEQ ID NO: 12203 - DNA, 20 bp, Homo Sapiens
ttgatagagtgatgagctat

SEQ ID NO: 12204 - DNA, 20 bp, Homo Sapiens
tgatagagtgatgagctatc

SEQ ID NO: 12205 - DNA, 20 bp, Homo Sapiens
gatagagtgatgagctatct

SEQ ID NO: 12206 - DNA, 20 bp, Homo Sapiens
atagagtgatgagctatctg

SEQ ID NO: 12207 - DNA, 20 bp, Homo Sapiens
tagagtgatgagctatctga

SEQ ID NO: 12208 - DNA, 20 bp, Homo Sapiens
agagtgatgagctatctgaa

SEQ ID NO: 12209 - DNA, 20 bp, Homo Sapiens
gagtgatgagctatctgaat

SEQ ID NO: 12210 - DNA, 20 bp, Homo Sapiens
agtgatgagctatctgaatg

SEQ ID NO: 12211 - DNA, 20 bp, Homo Sapiens
gtgatgagctatctgaatgc

SEQ ID NO: 12212 - DNA, 20 bp, Homo Sapiens
tgatgagctatctgaatgct

SEQ ID NO: 12213 - DNA, 20 bp, Homo Sapiens
gatgagctatctgaatgctt

SEQ ID NO: 12214 - DNA, 20 bp, Homo Sapiens
atgagctatctgaatgcttc

SEQ ID NO: 12215 - DNA, 20 bp, Homo Sapiens
tgagctatctgaatgcttcc

SEQ ID NO: 12216 - DNA, 20 bp, Homo Sapiens
gagctatctgaatgcttcct

SEQ ID NO: 12217 - DNA, 20 bp, Homo Sapiens
agctatctgaatgcttccta

SEQ ID NO: 12218 - DNA, 20 bp, Homo Sapiens
gctatctgaatgcttcctaa

SEQ ID NO: 12219 - DNA, 20 bp, Homo Sapiens
ctatctgaatgcttcctaaa

SEQ ID NO: 12220 - DNA, 20 bp, Homo Sapiens
tatctgaatgcttcctaaaa

SEQ ID NO: 12221 - DNA, 20 bp, Homo Sapiens
atctgaatgcttcctaaaaa

SEQ ID NO: 12222 - DNA, 20 bp, Homo Sapiens
tctgaatgcttcctaaaaag

SEQ ID NO: 12223 - DNA, 20 bp, Homo Sapiens
ctgaatgcttcctaaaaagc

SEQ ID NO: 12224 - DNA, 20 bp, Homo Sapiens
tgaatgcttcctaaaaagcg

SEQ ID NO: 12225 - DNA, 20 bp, Homo Sapiens
gaatgcttcctaaaaagcga

SEQ ID NO: 12226 - DNA, 20 bp, Homo Sapiens
aatgcttcctaaaaagcgag

SEQ ID NO: 12227 - DNA, 20 bp, Homo Sapiens
atgcttcctaaaaagcgagg

SEQ ID NO: 12228 - DNA, 20 bp, Homo Sapiens
tgcttcctaaaaagcgaggt

SEQ ID NO: 12229 - DNA, 20 bp, Homo Sapiens
gcttcctaaaaagcgaggtc

SEQ ID NO: 12230 - DNA, 20 bp, Homo Sapiens
cttcctaaaaagcgaggtcc

SEQ ID NO: 12231 - DNA, 20 bp, Homo Sapiens
ttcctaaaaagcgaggtccc

SEQ ID NO: 12232 - DNA, 20 bp, Homo Sapiens
tcctaaaaagcgaggtccct

SEQ ID NO: 12233 - DNA, 20 bp, Homo Sapiens
cctaaaaagcgaggtccctc

SEQ ID NO: 12234 - DNA, 20 bp, Homo Sapiens
ctaaaaagcgaggtccctcc

SEQ ID NO: 12235 - DNA, 20 bp, Homo Sapiens
taaaaagcgaggtccctcca

SEQ ID NO: 12236 - DNA, 20 bp, Homo Sapiens
aaaaagcgaggtccctccaa

SEQ ID NO: 12237 - DNA, 20 bp, Homo Sapiens
aaaagcgaggtccctccaaa

SEQ ID NO: 12238 - DNA, 20 bp, Homo Sapiens
aaagcgaggtccctccaaac

SEQ ID NO: 12239 - DNA, 20 bp, Homo Sapiens
aagcgaggtccctccaaacc

SEQ ID NO: 12240 - DNA, 20 bp, Homo Sapiens
agcgaggtccctccaaaccg

SEQ ID NO: 12241 - DNA, 20 bp, Homo Sapiens
gcgaggtccctccaaaccgt

SEQ ID NO: 12242 - DNA, 20 bp, Homo Sapiens
cgaggtccctccaaaccgtt

SEQ ID NO: 12243 - DNA, 20 bp, Homo Sapiens
gaggtccctccaaaccgttg

SEQ ID NO: 12244 - DNA, 20 bp, Homo Sapiens
aggtccctccaaaccgttgt

SEQ ID NO: 12245 - DNA, 20 bp, Homo Sapiens
ggtccctccaaaccgttgtc

SEQ ID NO: 12246 - DNA, 20 bp, Homo Sapiens
gtccctccaaaccgttgtca

SEQ ID NO: 12247 - DNA, 20 bp, Homo Sapiens
tccctccaaaccgttgtcat

SEQ ID NO: 12248 - DNA, 20 bp, Homo Sapiens
ccctccaaaccgttgtcatt

SEQ ID NO: 12249 - DNA, 20 bp, Homo Sapiens
cctccaaaccgttgtcattt

SEQ ID NO: 12250 - DNA, 20 bp, Homo Sapiens
ctccaaaccgttgtcatttt

SEQ ID NO: 12251 - DNA, 20 bp, Homo Sapiens
tccaaaccgttgtcattttt

SEQ ID NO: 12252 - DNA, 20 bp, Homo Sapiens
ccaaaccgttgtcattttta

SEQ ID NO: 12253 - DNA, 20 bp, Homo Sapiens
caaaccgttgtcatttttat

SEQ ID NO: 12254 - DNA, 20 bp, Homo Sapiens
aaaccgttgtcatttttata

SEQ ID NO: 12255 - DNA, 20 bp, Homo Sapiens
aaccgttgtcatttttataa

SEQ ID NO: 12256 - DNA, 20 bp, Homo Sapiens
accgttgtcatttttataaa

SEQ ID NO: 12257 - DNA, 20 bp, Homo Sapiens
ccgttgtcatttttataaaa

SEQ ID NO: 12258 - DNA, 20 bp, Homo Sapiens
cgttgtcatttttataaaac

SEQ ID NO: 12259 - DNA, 20 bp, Homo Sapiens
gttgtcatttttataaaact

SEQ ID NO: 12260 - DNA, 20 bp, Homo Sapiens
ttgtcatttttataaaactt

SEQ ID NO: 12261 - DNA, 20 bp, Homo Sapiens
tgtcatttttataaaacttt

SEQ ID NO: 12262 - DNA, 20 bp, Homo Sapiens
gtcatttttataaaactttg

SEQ ID NO: 12263 - DNA, 20 bp, Homo Sapiens
tcatttttataaaactttga

SEQ ID NO: 12264 - DNA, 20 bp, Homo Sapiens
catttttataaaactttgaa

SEQ ID NO: 12265 - DNA, 20 bp, Homo Sapiens
atttttataaaactttgaaa

SEQ ID NO: 12266 - DNA, 20 bp, Homo Sapiens
tttttataaaactttgaaat

SEQ ID NO: 12267 - DNA, 20 bp, Homo Sapiens
ttttataaaactttgaaatg

SEQ ID NO: 12268 - DNA, 20 bp, Homo Sapiens
tttataaaactttgaaatga

SEQ ID NO: 12269 - DNA, 20 bp, Homo Sapiens
ttataaaactttgaaatgag

SEQ ID NO: 12270 - DNA, 20 bp, Homo Sapiens
tataaaactttgaaatgagg

SEQ ID NO: 12271 - DNA, 20 bp, Homo Sapiens
ataaaactttgaaatgagga

SEQ ID NO: 12272 - DNA, 20 bp, Homo Sapiens
taaaactttgaaatgaggaa

SEQ ID NO: 12273 - DNA, 20 bp, Homo Sapiens
aaaactttgaaatgaggaaa

SEQ ID NO: 12274 - DNA, 20 bp, Homo Sapiens
aaactttgaaatgaggaaac

SEQ ID NO: 12275 - DNA, 20 bp, Homo Sapiens
aactttgaaatgaggaaact

SEQ ID NO: 12276 - DNA, 20 bp, Homo Sapiens
actttgaaatgaggaaactt

SEQ ID NO: 12277 - DNA, 20 bp, Homo Sapiens
ctttgaaatgaggaaacttt

SEQ ID NO: 12278 - DNA, 20 bp, Homo Sapiens
tttgaaatgaggaaactttg

SEQ ID NO: 12279 - DNA, 20 bp, Homo Sapiens
ttgaaatgaggaaactttga

SEQ ID NO: 12280 - DNA, 20 bp, Homo Sapiens
tgaaatgaggaaactttgat

SEQ ID NO: 12281 - DNA, 20 bp, Homo Sapiens
gaaatgaggaaactttgata

SEQ ID NO: 12282 - DNA, 20 bp, Homo Sapiens
aaatgaggaaactttgatag

SEQ ID NO: 12283 - DNA, 20 bp, Homo Sapiens
aatgaggaaactttgatagg

SEQ ID NO: 12284 - DNA, 20 bp, Homo Sapiens
atgaggaaactttgatagga

SEQ ID NO: 12285 - DNA, 20 bp, Homo Sapiens
tgaggaaactttgataggat

SEQ ID NO: 12286 - DNA, 20 bp, Homo Sapiens
gaggaaactttgataggatg

SEQ ID NO: 12287 - DNA, 20 bp, Homo Sapiens
aggaaactttgataggatgt

SEQ ID NO: 12288 - DNA, 20 bp, Homo Sapiens
ggaaactttgataggatgtg

SEQ ID NO: 12289 - DNA, 20 bp, Homo Sapiens
gaaactttgataggatgtgg

SEQ ID NO: 12290 - DNA, 20 bp, Homo Sapiens
aaactttgataggatgtgga

SEQ ID NO: 12291 - DNA, 20 bp, Homo Sapiens
aactttgataggatgtggat

SEQ ID NO: 12292 - DNA, 20 bp, Homo Sapiens
actttgataggatgtggatt

SEQ ID NO: 12293 - DNA, 20 bp, Homo Sapiens
ctttgataggatgtggatta

SEQ ID NO: 12294 - DNA, 20 bp, Homo Sapiens
tttgataggatgtggattaa

SEQ ID NO: 12295 - DNA, 20 bp, Homo Sapiens
ttgataggatgtggattaag

SEQ ID NO: 12296 - DNA, 20 bp, Homo Sapiens
tgataggatgtggattaaga

SEQ ID NO: 12297 - DNA, 20 bp, Homo Sapiens
gataggatgtggattaagaa

SEQ ID NO: 12298 - DNA, 20 bp, Homo Sapiens
ataggatgtggattaagaac

SEQ ID NO: 12299 - DNA, 20 bp, Homo Sapiens
taggatgtggattaagaact

SEQ ID NO: 12300 - DNA, 20 bp, Homo Sapiens
aggatgtggattaagaacta

SEQ ID NO: 12301 - DNA, 20 bp, Homo Sapiens
ggatgtggattaagaactag

SEQ ID NO: 12302 - DNA, 20 bp, Homo Sapiens
gatgtggattaagaactagg

SEQ ID NO: 12303 - DNA, 20 bp, Homo Sapiens
atgtggattaagaactaggg

SEQ ID NO: 12304 - DNA, 20 bp, Homo Sapiens
tgtggattaagaactaggga

SEQ ID NO: 12305 - DNA, 20 bp, Homo Sapiens
gtggattaagaactagggag

SEQ ID NO: 12306 - DNA, 20 bp, Homo Sapiens
tggattaagaactagggagg

SEQ ID NO: 12307 - DNA, 20 bp, Homo Sapiens
ggattaagaactagggaggg

SEQ ID NO: 12308 - DNA, 20 bp, Homo Sapiens
gattaagaactagggagggg

SEQ ID NO: 12309 - DNA, 20 bp, Homo Sapiens
attaagaactagggaggggg

SEQ ID NO: 12310 - DNA, 20 bp, Homo Sapiens
ttaagaactagggaggggga

SEQ ID NO: 12311 - DNA, 20 bp, Homo Sapiens
taagaactagggagggggaa

SEQ ID NO: 12312 - DNA, 20 bp, Homo Sapiens
aagaactagggagggggaaa

SEQ ID NO: 12313 - DNA, 20 bp, Homo Sapiens
agaactagggagggggaaag

SEQ ID NO: 12314 - DNA, 20 bp, Homo Sapiens
gaactagggagggggaaaga

SEQ ID NO: 12315 - DNA, 20 bp, Homo Sapiens
aactagggagggggaaagaa

SEQ ID NO: 12316 - DNA, 20 bp, Homo Sapiens
actagggagggggaaagaag

SEQ ID NO: 12317 - DNA, 20 bp, Homo Sapiens
ctagggagggggaaagaagg

SEQ ID NO: 12318 - DNA, 20 bp, Homo Sapiens
tagggagggggaaagaagga

SEQ ID NO: 12319 - DNA, 20 bp, Homo Sapiens
agggagggggaaagaaggat

SEQ ID NO: 12320 - DNA, 20 bp, Homo Sapiens
gggagggggaaagaaggatg

SEQ ID NO: 12321 - DNA, 20 bp, Homo Sapiens
ggagggggaaagaaggatgg

SEQ ID NO: 12322 - DNA, 20 bp, Homo Sapiens
gagggggaaagaaggatggg

SEQ ID NO: 12323 - DNA, 20 bp, Homo Sapiens
agggggaaagaaggatggga

SEQ ID NO: 12324 - DNA, 20 bp, Homo Sapiens
gggggaaagaaggatgggac

SEQ ID NO: 12325 - DNA, 20 bp, Homo Sapiens
ggggaaagaaggatgggact

SEQ ID NO: 12326 - DNA, 20 bp, Homo Sapiens
gggaaagaaggatgggacta

SEQ ID NO: 12327 - DNA, 20 bp, Homo Sapiens
ggaaagaaggatgggactat

SEQ ID NO: 12328 - DNA, 20 bp, Homo Sapiens
gaaagaaggatgggactatt

SEQ ID NO: 12329 - DNA, 20 bp, Homo Sapiens
aaagaaggatgggactatta

SEQ ID NO: 12330 - DNA, 20 bp, Homo Sapiens
aagaaggatgggactattac

SEQ ID NO: 12331 - DNA, 20 bp, Homo Sapiens
agaaggatgggactattaca

SEQ ID NO: 12332 - DNA, 20 bp, Homo Sapiens
gaaggatgggactattacat

SEQ ID NO: 12333 - DNA, 20 bp, Homo Sapiens
aaggatgggactattacatc

SEQ ID NO: 12334 - DNA, 20 bp, Homo Sapiens
aggatgggactattacatcc

SEQ ID NO: 12335 - DNA, 20 bp, Homo Sapiens
ggatgggactattacatcca

SEQ ID NO: 12336 - DNA, 20 bp, Homo Sapiens
gatgggactattacatccac

SEQ ID NO: 12337 - DNA, 20 bp, Homo Sapiens
atgggactattacatccaca

SEQ ID NO: 12338 - DNA, 20 bp, Homo Sapiens
tgggactattacatccacat

SEQ ID NO: 12339 - DNA, 20 bp, Homo Sapiens
gggactattacatccacatg

SEQ ID NO: 12340 - DNA, 20 bp, Homo Sapiens
ggactattacatccacatga

SEQ ID NO: 12341 - DNA, 20 bp, Homo Sapiens
gactattacatccacatgat

SEQ ID NO: 12342 - DNA, 20 bp, Homo Sapiens
actattacatccacatgata

SEQ ID NO: 12343 - DNA, 20 bp, Homo Sapiens
ctattacatccacatgatac

SEQ ID NO: 12344 - DNA, 20 bp, Homo Sapiens
tattacatccacatgatacc

SEQ ID NO: 12345 - DNA, 20 bp, Homo Sapiens
attacatccacatgatacct

SEQ ID NO: 12346 - DNA, 20 bp, Homo Sapiens
ttacatccacatgatacctc

SEQ ID NO: 12347 - DNA, 20 bp, Homo Sapiens
tacatccacatgatacctct

SEQ ID NO: 12348 - DNA, 20 bp, Homo Sapiens
acatccacatgatacctctg

SEQ ID NO: 12349 - DNA, 20 bp, Homo Sapiens
catccacatgatacctctga

SEQ ID NO: 12350 - DNA, 20 bp, Homo Sapiens
atccacatgatacctctgat

SEQ ID NO: 12351 - DNA, 20 bp, Homo Sapiens
tccacatgatacctctgatc

SEQ ID NO: 12352 - DNA, 20 bp, Homo Sapiens
ccacatgatacctctgatca

SEQ ID NO: 12353 - DNA, 20 bp, Homo Sapiens
cacatgatacctctgatcaa

SEQ ID NO: 12354 - DNA, 20 bp, Homo Sapiens
acatgatacctctgatcaag

SEQ ID NO: 12355 - DNA, 20 bp, Homo Sapiens
catgatacctctgatcaagt

SEQ ID NO: 12356 - DNA, 20 bp, Homo Sapiens
atgatacctctgatcaagta

SEQ ID NO: 12357 - DNA, 20 bp, Homo Sapiens
tgatacctctgatcaagtat

SEQ ID NO: 12358 - DNA, 20 bp, Homo Sapiens
gatacctctgatcaagtatt

SEQ ID NO: 12359 - DNA, 20 bp, Homo Sapiens
atacctctgatcaagtattt

SEQ ID NO: 12360 - DNA, 20 bp, Homo Sapiens
tacctctgatcaagtatttt

SEQ ID NO: 12361 - DNA, 20 bp, Homo Sapiens
acctctgatcaagtattttt

SEQ ID NO: 12362 - DNA, 20 bp, Homo Sapiens
cctctgatcaagtatttttg

SEQ ID NO: 12363 - DNA, 20 bp, Homo Sapiens
ctctgatcaagtatttttga

SEQ ID NO: 12364 - DNA, 20 bp, Homo Sapiens
tctgatcaagtatttttgac

SEQ ID NO: 12365 - DNA, 20 bp, Homo Sapiens
ctgatcaagtatttttgaca

SEQ ID NO: 12366 - DNA, 20 bp, Homo Sapiens
tgatcaagtatttttgacat

SEQ ID NO: 12367 - DNA, 20 bp, Homo Sapiens
gatcaagtatttttgacatt

SEQ ID NO: 12368 - DNA, 20 bp, Homo Sapiens
atcaagtatttttgacattt

SEQ ID NO: 12369 - DNA, 20 bp, Homo Sapiens
tcaagtatttttgacattta

SEQ ID NO: 12370 - DNA, 20 bp, Homo Sapiens
caagtatttttgacatttac

SEQ ID NO: 12371 - DNA, 20 bp, Homo Sapiens
aagtatttttgacatttact

SEQ ID NO: 12372 - DNA, 20 bp, Homo Sapiens
agtatttttgacatttactg

SEQ ID NO: 12373 - DNA, 20 bp, Homo Sapiens
gtatttttgacatttactgt

SEQ ID NO: 12374 - DNA, 20 bp, Homo Sapiens
tatttttgacatttactgtg

SEQ ID NO: 12375 - DNA, 20 bp, Homo Sapiens
atttttgacatttactgtgg

SEQ ID NO: 12376 - DNA, 20 bp, Homo Sapiens
tttttgacatttactgtgga

SEQ ID NO: 12377 - DNA, 20 bp, Homo Sapiens
ttttgacatttactgtggat

SEQ ID NO: 12378 - DNA, 20 bp, Homo Sapiens
tttgacatttactgtggata

SEQ ID NO: 12379 - DNA, 20 bp, Homo Sapiens
ttgacatttactgtggataa

SEQ ID NO: 12380 - DNA, 20 bp, Homo Sapiens
tgacatttactgtggataaa

SEQ ID NO: 12381 - DNA, 20 bp, Homo Sapiens
gacatttactgtggataaat

SEQ ID NO: 12382 - DNA, 20 bp, Homo Sapiens
acatttactgtggataaatt

SEQ ID NO: 12383 - DNA, 20 bp, Homo Sapiens
catttactgtggataaattg

SEQ ID NO: 12384 - DNA, 20 bp, Homo Sapiens
atttactgtggataaattgt

SEQ ID NO: 12385 - DNA, 20 bp, Homo Sapiens
tttactgtggataaattgtt

SEQ ID NO: 12386 - DNA, 20 bp, Homo Sapiens
ttactgtggataaattgttt

SEQ ID NO: 12387 - DNA, 20 bp, Homo Sapiens
tactgtggataaattgtttt

SEQ ID NO: 12388 - DNA, 20 bp, Homo Sapiens
actgtggataaattgttttt

SEQ ID NO: 12389 - DNA, 20 bp, Homo Sapiens
ctgtggataaattgttttta

SEQ ID NO: 12390 - DNA, 20 bp, Homo Sapiens
tgtggataaattgtttttaa

SEQ ID NO: 12391 - DNA, 20 bp, Homo Sapiens
gtggataaattgtttttaag

SEQ ID NO: 12392 - DNA, 20 bp, Homo Sapiens
tggataaattgtttttaagt

SEQ ID NO: 12393 - DNA, 20 bp, Homo Sapiens
ggataaattgtttttaagtt

SEQ ID NO: 12394 - DNA, 20 bp, Homo Sapiens
gataaattgtttttaagttt

SEQ ID NO: 12395 - DNA, 20 bp, Homo Sapiens
ataaattgtttttaagtttt

SEQ ID NO: 12396 - DNA, 20 bp, Homo Sapiens
taaattgtttttaagttttc

SEQ ID NO: 12397 - DNA, 20 bp, Homo Sapiens
aaattgtttttaagttttca

SEQ ID NO: 12398 - DNA, 20 bp, Homo Sapiens
aattgtttttaagttttcat

SEQ ID NO: 12399 - DNA, 20 bp, Homo Sapiens
attgtttttaagttttcatg

SEQ ID NO: 12400 - DNA, 20 bp, Homo Sapiens
ttgtttttaagttttcatga

SEQ ID NO: 12401 - DNA, 20 bp, Homo Sapiens
tgtttttaagttttcatgaa

SEQ ID NO: 12402 - DNA, 20 bp, Homo Sapiens
gtttttaagttttcatgaat

SEQ ID NO: 12403 - DNA, 20 bp, Homo Sapiens
tttttaagttttcatgaatg

SEQ ID NO: 12404 - DNA, 20 bp, Homo Sapiens
ttttaagttttcatgaatga

SEQ ID NO: 12405 - DNA, 20 bp, Homo Sapiens
tttaagttttcatgaatgaa

SEQ ID NO: 12406 - DNA, 20 bp, Homo Sapiens
ttaagttttcatgaatgaat

SEQ ID NO: 12407 - DNA, 20 bp, Homo Sapiens
taagttttcatgaatgaatt

SEQ ID NO: 12408 - DNA, 20 bp, Homo Sapiens
aagttttcatgaatgaattg

SEQ ID NO: 12409 - DNA, 20 bp, Homo Sapiens
agttttcatgaatgaattgc

SEQ ID NO: 12410 - DNA, 20 bp, Homo Sapiens
gttttcatgaatgaattgct

SEQ ID NO: 12411 - DNA, 20 bp, Homo Sapiens
ttttcatgaatgaattgcta

SEQ ID NO: 12412 - DNA, 20 bp, Homo Sapiens
tttcatgaatgaattgctaa

SEQ ID NO: 12413 - DNA, 20 bp, Homo Sapiens
ttcatgaatgaattgctaag

SEQ ID NO: 12414 - DNA, 20 bp, Homo Sapiens
tcatgaatgaattgctaaga

SEQ ID NO: 12415 - DNA, 20 bp, Homo Sapiens
catgaatgaattgctaagaa

SEQ ID NO: 12416 - DNA, 20 bp, Homo Sapiens
atgaatgaattgctaagaag

SEQ ID NO: 12417 - DNA, 20 bp, Homo Sapiens
tgaatgaattgctaagaagg

SEQ ID NO: 12418 - DNA, 20 bp, Homo Sapiens
gaatgaattgctaagaaggg

SEQ ID NO: 12419 - DNA, 20 bp, Homo Sapiens
aatgaattgctaagaaggga

SEQ ID NO: 12420 - DNA, 20 bp, Homo Sapiens
atgaattgctaagaagggaa

SEQ ID NO: 12421 - DNA, 20 bp, Homo Sapiens
tgaattgctaagaagggaaa

SEQ ID NO: 12422 - DNA, 20 bp, Homo Sapiens
gaattgctaagaagggaaaa

SEQ ID NO: 12423 - DNA, 20 bp, Homo Sapiens
aattgctaagaagggaaaat

SEQ ID NO: 12424 - DNA, 20 bp, Homo Sapiens
attgctaagaagggaaaata

SEQ ID NO: 12425 - DNA, 20 bp, Homo Sapiens
ttgctaagaagggaaaatat

SEQ ID NO: 12426 - DNA, 20 bp, Homo Sapiens
tgctaagaagggaaaatatc

SEQ ID NO: 12427 - DNA, 20 bp, Homo Sapiens
gctaagaagggaaaatatcc

SEQ ID NO: 12428 - DNA, 20 bp, Homo Sapiens
ctaagaagggaaaatatcca

SEQ ID NO: 12429 - DNA, 20 bp, Homo Sapiens
taagaagggaaaatatccat

SEQ ID NO: 12430 - DNA, 20 bp, Homo Sapiens
aagaagggaaaatatccatc

SEQ ID NO: 12431 - DNA, 20 bp, Homo Sapiens
agaagggaaaatatccatcc

SEQ ID NO: 12432 - DNA, 20 bp, Homo Sapiens
gaagggaaaatatccatcct

SEQ ID NO: 12433 - DNA, 20 bp, Homo Sapiens
aagggaaaatatccatcctg

SEQ ID NO: 12434 - DNA, 20 bp, Homo Sapiens
agggaaaatatccatcctga

SEQ ID NO: 12435 - DNA, 20 bp, Homo Sapiens
gggaaaatatccatcctgaa

SEQ ID NO: 12436 - DNA, 20 bp, Homo Sapiens
ggaaaatatccatcctgaag

SEQ ID NO: 12437 - DNA, 20 bp, Homo Sapiens
gaaaatatccatcctgaagg

SEQ ID NO: 12438 - DNA, 20 bp, Homo Sapiens
aaaatatccatcctgaaggt

SEQ ID NO: 12439 - DNA, 20 bp, Homo Sapiens
aaatatccatcctgaaggtg

SEQ ID NO: 12440 - DNA, 20 bp, Homo Sapiens
aatatccatcctgaaggtgt

SEQ ID NO: 12441 - DNA, 20 bp, Homo Sapiens
atatccatcctgaaggtgtt

SEQ ID NO: 12442 - DNA, 20 bp, Homo Sapiens
tatccatcctgaaggtgttt

SEQ ID NO: 12443 - DNA, 20 bp, Homo Sapiens
atccatcctgaaggtgtttt

SEQ ID NO: 12444 - DNA, 20 bp, Homo Sapiens
tccatcctgaaggtgttttt

SEQ ID NO: 12445 - DNA, 20 bp, Homo Sapiens
ccatcctgaaggtgtttttc

SEQ ID NO: 12446 - DNA, 20 bp, Homo Sapiens
catcctgaaggtgtttttca

SEQ ID NO: 12447 - DNA, 20 bp, Homo Sapiens
atcctgaaggtgtttttcat

SEQ ID NO: 12448 - DNA, 20 bp, Homo Sapiens
tcctgaaggtgtttttcatt

SEQ ID NO: 12449 - DNA, 20 bp, Homo Sapiens
cctgaaggtgtttttcattc

SEQ ID NO: 12450 - DNA, 20 bp, Homo Sapiens
ctgaaggtgtttttcattca

SEQ ID NO: 12451 - DNA, 20 bp, Homo Sapiens
tgaaggtgtttttcattcac

SEQ ID NO: 12452 - DNA, 20 bp, Homo Sapiens
gaaggtgtttttcattcact

SEQ ID NO: 12453 - DNA, 20 bp, Homo Sapiens
aaggtgtttttcattcactt

SEQ ID NO: 12454 - DNA, 20 bp, Homo Sapiens
aggtgtttttcattcacttt

SEQ ID NO: 12455 - DNA, 20 bp, Homo Sapiens
ggtgtttttcattcacttta

SEQ ID NO: 12456 - DNA, 20 bp, Homo Sapiens
gtgtttttcattcactttaa

SEQ ID NO: 12457 - DNA, 20 bp, Homo Sapiens
tgtttttcattcactttaat

SEQ ID NO: 12458 - DNA, 20 bp, Homo Sapiens
gtttttcattcactttaata

SEQ ID NO: 12459 - DNA, 20 bp, Homo Sapiens
tttttcattcactttaatag

SEQ ID NO: 12460 - DNA, 20 bp, Homo Sapiens
ttttcattcactttaataga

SEQ ID NO: 12461 - DNA, 20 bp, Homo Sapiens
tttcattcactttaatagaa

SEQ ID NO: 12462 - DNA, 20 bp, Homo Sapiens
ttcattcactttaatagaag

SEQ ID NO: 12463 - DNA, 20 bp, Homo Sapiens
tcattcactttaatagaagg

SEQ ID NO: 12464 - DNA, 20 bp, Homo Sapiens
cattcactttaatagaaggg

SEQ ID NO: 12465 - DNA, 20 bp, Homo Sapiens
attcactttaatagaagggc

SEQ ID NO: 12466 - DNA, 20 bp, Homo Sapiens
ttcactttaatagaagggca

SEQ ID NO: 12467 - DNA, 20 bp, Homo Sapiens
tcactttaatagaagggcaa

SEQ ID NO: 12468 - DNA, 20 bp, Homo Sapiens
cactttaatagaagggcaaa

SEQ ID NO: 12469 - DNA, 20 bp, Homo Sapiens
actttaatagaagggcaaat

SEQ ID NO: 12470 - DNA, 20 bp, Homo Sapiens
ctttaatagaagggcaaata

SEQ ID NO: 12471 - DNA, 20 bp, Homo Sapiens
tttaatagaagggcaaatat

SEQ ID NO: 12472 - DNA, 20 bp, Homo Sapiens
ttaatagaagggcaaatatt

SEQ ID NO: 12473 - DNA, 20 bp, Homo Sapiens
taatagaagggcaaatattt

SEQ ID NO: 12474 - DNA, 20 bp, Homo Sapiens
aatagaagggcaaatattta

SEQ ID NO: 12475 - DNA, 20 bp, Homo Sapiens
atagaagggcaaatatttat

SEQ ID NO: 12476 - DNA, 20 bp, Homo Sapiens
tagaagggcaaatatttata

SEQ ID NO: 12477 - DNA, 20 bp, Homo Sapiens
agaagggcaaatatttataa

SEQ ID NO: 12478 - DNA, 20 bp, Homo Sapiens
gaagggcaaatatttataag

SEQ ID NO: 12479 - DNA, 20 bp, Homo Sapiens
aagggcaaatatttataagc

SEQ ID NO: 12480 - DNA, 20 bp, Homo Sapiens
agggcaaatatttataagct

SEQ ID NO: 12481 - DNA, 20 bp, Homo Sapiens
gggcaaatatttataagcta

SEQ ID NO: 12482 - DNA, 20 bp, Homo Sapiens
ggcaaatatttataagctat

SEQ ID NO: 12483 - DNA, 20 bp, Homo Sapiens
gcaaatatttataagctatt

SEQ ID NO: 12484 - DNA, 20 bp, Homo Sapiens
caaatatttataagctattt

SEQ ID NO: 12485 - DNA, 20 bp, Homo Sapiens
aaatatttataagctatttc

SEQ ID NO: 12486 - DNA, 20 bp, Homo Sapiens
aatatttataagctatttct

SEQ ID NO: 12487 - DNA, 20 bp, Homo Sapiens
atatttataagctatttctg

SEQ ID NO: 12488 - DNA, 20 bp, Homo Sapiens
tatttataagctatttctgt

SEQ ID NO: 12489 - DNA, 20 bp, Homo Sapiens
atttataagctatttctgta

SEQ ID NO: 12490 - DNA, 20 bp, Homo Sapiens
tttataagctatttctgtac

SEQ ID NO: 12491 - DNA, 20 bp, Homo Sapiens
ttataagctatttctgtacc

SEQ ID NO: 12492 - DNA, 20 bp, Homo Sapiens
tataagctatttctgtacca

SEQ ID NO: 12493 - DNA, 20 bp, Homo Sapiens
ataagctatttctgtaccaa

SEQ ID NO: 12494 - DNA, 20 bp, Homo Sapiens
taagctatttctgtaccaaa

SEQ ID NO: 12495 - DNA, 20 bp, Homo Sapiens
aagctatttctgtaccaaag

SEQ ID NO: 12496 - DNA, 20 bp, Homo Sapiens
agctatttctgtaccaaagt

SEQ ID NO: 12497 - DNA, 20 bp, Homo Sapiens
gctatttctgtaccaaagtg

SEQ ID NO: 12498 - DNA, 20 bp, Homo Sapiens
ctatttctgtaccaaagtgt

SEQ ID NO: 12499 - DNA, 20 bp, Homo Sapiens
tatttctgtaccaaagtgtt

SEQ ID NO: 12500 - DNA, 20 bp, Homo Sapiens
atttctgtaccaaagtgttt

SEQ ID NO: 12501 - DNA, 20 bp, Homo Sapiens
tttctgtaccaaagtgtttg

SEQ ID NO: 12502 - DNA, 20 bp, Homo Sapiens
ttctgtaccaaagtgtttgt

SEQ ID NO: 12503 - DNA, 20 bp, Homo Sapiens
tctgtaccaaagtgtttgtg

SEQ ID NO: 12504 - DNA, 20 bp, Homo Sapiens
ctgtaccaaagtgtttgtgg

SEQ ID NO: 12505 - DNA, 20 bp, Homo Sapiens
tgtaccaaagtgtttgtgga

SEQ ID NO: 12506 - DNA, 20 bp, Homo Sapiens
gtaccaaagtgtttgtggaa

SEQ ID NO: 12507 - DNA, 20 bp, Homo Sapiens
taccaaagtgtttgtggaaa

SEQ ID NO: 12508 - DNA, 20 bp, Homo Sapiens
accaaagtgtttgtggaaac

SEQ ID NO: 12509 - DNA, 20 bp, Homo Sapiens
ccaaagtgtttgtggaaaca

SEQ ID NO: 12510 - DNA, 20 bp, Homo Sapiens
caaagtgtttgtggaaacaa

SEQ ID NO: 12511 - DNA, 20 bp, Homo Sapiens
aaagtgtttgtggaaacaaa

SEQ ID NO: 12512 - DNA, 20 bp, Homo Sapiens
aagtgtttgtggaaacaaac

SEQ ID NO: 12513 - DNA, 20 bp, Homo Sapiens
agtgtttgtggaaacaaaca

SEQ ID NO: 12514 - DNA, 20 bp, Homo Sapiens
gtgtttgtggaaacaaacat

SEQ ID NO: 12515 - DNA, 20 bp, Homo Sapiens
tgtttgtggaaacaaacatg

SEQ ID NO: 12516 - DNA, 20 bp, Homo Sapiens
gtttgtggaaacaaacatgt

SEQ ID NO: 12517 - DNA, 20 bp, Homo Sapiens
tttgtggaaacaaacatgta

SEQ ID NO: 12518 - DNA, 20 bp, Homo Sapiens
ttgtggaaacaaacatgtaa

SEQ ID NO: 12519 - DNA, 20 bp, Homo Sapiens
tgtggaaacaaacatgtaag

SEQ ID NO: 12520 - DNA, 20 bp, Homo Sapiens
gtggaaacaaacatgtaagc

SEQ ID NO: 12521 - DNA, 20 bp, Homo Sapiens
tggaaacaaacatgtaagca

SEQ ID NO: 12522 - DNA, 20 bp, Homo Sapiens
ggaaacaaacatgtaagcat

SEQ ID NO: 12523 - DNA, 20 bp, Homo Sapiens
gaaacaaacatgtaagcata

SEQ ID NO: 12524 - DNA, 20 bp, Homo Sapiens
aaacaaacatgtaagcataa

SEQ ID NO: 12525 - DNA, 20 bp, Homo Sapiens
aacaaacatgtaagcataac

SEQ ID NO: 12526 - DNA, 20 bp, Homo Sapiens
acaaacatgtaagcataact

SEQ ID NO: 12527 - DNA, 20 bp, Homo Sapiens
caaacatgtaagcataactt

SEQ ID NO: 12528 - DNA, 20 bp, Homo Sapiens
aaacatgtaagcataactta

SEQ ID NO: 12529 - DNA, 20 bp, Homo Sapiens
aacatgtaagcataacttat

SEQ ID NO: 12530 - DNA, 20 bp, Homo Sapiens
acatgtaagcataacttatt

SEQ ID NO: 12531 - DNA, 20 bp, Homo Sapiens
catgtaagcataacttattt

SEQ ID NO: 12532 - DNA, 20 bp, Homo Sapiens
atgtaagcataacttatttt

SEQ ID NO: 12533 - DNA, 20 bp, Homo Sapiens
tgtaagcataacttatttta

SEQ ID NO: 12534 - DNA, 20 bp, Homo Sapiens
gtaagcataacttattttaa

SEQ ID NO: 12535 - DNA, 20 bp, Homo Sapiens
taagcataacttattttaaa

SEQ ID NO: 12536 - DNA, 20 bp, Homo Sapiens
aagcataacttattttaaaa

SEQ ID NO: 12537 - DNA, 20 bp, Homo Sapiens
agcataacttattttaaaat

SEQ ID NO: 12538 - DNA, 20 bp, Homo Sapiens
gcataacttattttaaaata

SEQ ID NO: 12539 - DNA, 20 bp, Homo Sapiens
cataacttattttaaaatat

SEQ ID NO: 12540 - DNA, 20 bp, Homo Sapiens
ataacttattttaaaatatt

SEQ ID NO: 12541 - DNA, 20 bp, Homo Sapiens
taacttattttaaaatattt

SEQ ID NO: 12542 - DNA, 20 bp, Homo Sapiens
aacttattttaaaatattta

SEQ ID NO: 12543 - DNA, 20 bp, Homo Sapiens
acttattttaaaatatttat

SEQ ID NO: 12544 - DNA, 20 bp, Homo Sapiens
cttattttaaaatatttatt

SEQ ID NO: 12545 - DNA, 20 bp, Homo Sapiens
ttattttaaaatatttattt

SEQ ID NO: 12546 - DNA, 20 bp, Homo Sapiens
tattttaaaatatttattta

SEQ ID NO: 12547 - DNA, 20 bp, Homo Sapiens
attttaaaatatttatttat

SEQ ID NO: 12548 - DNA, 20 bp, Homo Sapiens
ttttaaaatatttatttata

SEQ ID NO: 12549 - DNA, 20 bp, Homo Sapiens
tttaaaatatttatttatat

SEQ ID NO: 12550 - DNA, 20 bp, Homo Sapiens
ttaaaatatttatttatata

SEQ ID NO: 12551 - DNA, 20 bp, Homo Sapiens
taaaatatttatttatataa

SEQ ID NO: 12552 - DNA, 20 bp, Homo Sapiens
aaaatatttatttatataac

SEQ ID NO: 12553 - DNA, 20 bp, Homo Sapiens
aaatatttatttatataact

SEQ ID NO: 12554 - DNA, 20 bp, Homo Sapiens
aatatttatttatataactt

SEQ ID NO: 12555 - DNA, 20 bp, Homo Sapiens
atatttatttatataacttg

SEQ ID NO: 12556 - DNA, 20 bp, Homo Sapiens
tatttatttatataacttgg

SEQ ID NO: 12557 - DNA, 20 bp, Homo Sapiens
atttatttatataacttggt

SEQ ID NO: 12558 - DNA, 20 bp, Homo Sapiens
tttatttatataacttggta

SEQ ID NO: 12559 - DNA, 20 bp, Homo Sapiens
ttatttatataacttggtaa

SEQ ID NO: 12560 - DNA, 20 bp, Homo Sapiens
tatttatataacttggtaat

SEQ ID NO: 12561 - DNA, 20 bp, Homo Sapiens
atttatataacttggtaatc

SEQ ID NO: 12562 - DNA, 20 bp, Homo Sapiens
tttatataacttggtaatca

SEQ ID NO: 12563 - DNA, 20 bp, Homo Sapiens
ttatataacttggtaatcat

SEQ ID NO: 12564 - DNA, 20 bp, Homo Sapiens
tatataacttggtaatcatg

SEQ ID NO: 12565 - DNA, 20 bp, Homo Sapiens
atataacttggtaatcatga

SEQ ID NO: 12566 - DNA, 20 bp, Homo Sapiens
tataacttggtaatcatgaa

SEQ ID NO: 12567 - DNA, 20 bp, Homo Sapiens
ataacttggtaatcatgaaa

SEQ ID NO: 12568 - DNA, 20 bp, Homo Sapiens
taacttggtaatcatgaaag

SEQ ID NO: 12569 - DNA, 20 bp, Homo Sapiens
aacttggtaatcatgaaagc

SEQ ID NO: 12570 - DNA, 20 bp, Homo Sapiens
acttggtaatcatgaaagca

SEQ ID NO: 12571 - DNA, 20 bp, Homo Sapiens
cttggtaatcatgaaagcat

SEQ ID NO: 12572 - DNA, 20 bp, Homo Sapiens
ttggtaatcatgaaagcatc

SEQ ID NO: 12573 - DNA, 20 bp, Homo Sapiens
tggtaatcatgaaagcatct

SEQ ID NO: 12574 - DNA, 20 bp, Homo Sapiens
ggtaatcatgaaagcatctg

SEQ ID NO: 12575 - DNA, 20 bp, Homo Sapiens
gtaatcatgaaagcatctga

SEQ ID NO: 12576 - DNA, 20 bp, Homo Sapiens
taatcatgaaagcatctgag

SEQ ID NO: 12577 - DNA, 20 bp, Homo Sapiens
aatcatgaaagcatctgagc

SEQ ID NO: 12578 - DNA, 20 bp, Homo Sapiens
atcatgaaagcatctgagct

SEQ ID NO: 12579 - DNA, 20 bp, Homo Sapiens
tcatgaaagcatctgagcta

SEQ ID NO: 12580 - DNA, 20 bp, Homo Sapiens
catgaaagcatctgagctaa

SEQ ID NO: 12581 - DNA, 20 bp, Homo Sapiens
atgaaagcatctgagctaac

SEQ ID NO: 12582 - DNA, 20 bp, Homo Sapiens
tgaaagcatctgagctaact

SEQ ID NO: 12583 - DNA, 20 bp, Homo Sapiens
gaaagcatctgagctaactt

SEQ ID NO: 12584 - DNA, 20 bp, Homo Sapiens
aaagcatctgagctaactta

SEQ ID NO: 12585 - DNA, 20 bp, Homo Sapiens
aagcatctgagctaacttat

SEQ ID NO: 12586 - DNA, 20 bp, Homo Sapiens
agcatctgagctaacttata

SEQ ID NO: 12587 - DNA, 20 bp, Homo Sapiens
gcatctgagctaacttatat

SEQ ID NO: 12588 - DNA, 20 bp, Homo Sapiens
catctgagctaacttatatt

SEQ ID NO: 12589 - DNA, 20 bp, Homo Sapiens
atctgagctaacttatattt

SEQ ID NO: 12590 - DNA, 20 bp, Homo Sapiens
tctgagctaacttatattta

SEQ ID NO: 12591 - DNA, 20 bp, Homo Sapiens
ctgagctaacttatatttat

SEQ ID NO: 12592 - DNA, 20 bp, Homo Sapiens
tgagctaacttatatttatt

SEQ ID NO: 12593 - DNA, 20 bp, Homo Sapiens
gagctaacttatatttattt

SEQ ID NO: 12594 - DNA, 20 bp, Homo Sapiens
agctaacttatatttattta

SEQ ID NO: 12595 - DNA, 20 bp, Homo Sapiens
gctaacttatatttatttat

SEQ ID NO: 12596 - DNA, 20 bp, Homo Sapiens
ctaacttatatttatttatg

SEQ ID NO: 12597 - DNA, 20 bp, Homo Sapiens
taacttatatttatttatgt

SEQ ID NO: 12598 - DNA, 20 bp, Homo Sapiens
aacttatatttatttatgtt

SEQ ID NO: 12599 - DNA, 20 bp, Homo Sapiens
acttatatttatttatgtta

SEQ ID NO: 12600 - DNA, 20 bp, Homo Sapiens
cttatatttatttatgttat

SEQ ID NO: 12601 - DNA, 20 bp, Homo Sapiens
ttatatttatttatgttata

SEQ ID NO: 12602 - DNA, 20 bp, Homo Sapiens
tatatttatttatgttatat

SEQ ID NO: 12603 - DNA, 20 bp, Homo Sapiens
atatttatttatgttatatt

SEQ ID NO: 12604 - DNA, 20 bp, Homo Sapiens
tatttatttatgttatattt

SEQ ID NO: 12605 - DNA, 20 bp, Homo Sapiens
atttatttatgttatattta

SEQ ID NO: 12606 - DNA, 20 bp, Homo Sapiens
tttatttatgttatatttat

SEQ ID NO: 12607 - DNA, 20 bp, Homo Sapiens
ttatttatgttatatttatt

SEQ ID NO: 12608 - DNA, 20 bp, Homo Sapiens
tatttatgttatatttatta

SEQ ID NO: 12609 - DNA, 20 bp, Homo Sapiens
atttatgttatatttattaa

SEQ ID NO: 12610 - DNA, 20 bp, Homo Sapiens
tttatgttatatttattaaa

SEQ ID NO: 12611 - DNA, 20 bp, Homo Sapiens
ttatgttatatttattaaat

SEQ ID NO: 12612 - DNA, 20 bp, Homo Sapiens
tatgttatatttattaaatt

SEQ ID NO: 12613 - DNA, 20 bp, Homo Sapiens
atgttatatttattaaatta

SEQ ID NO: 12614 - DNA, 20 bp, Homo Sapiens
tgttatatttattaaattat

SEQ ID NO: 12615 - DNA, 20 bp, Homo Sapiens
gttatatttattaaattatt

SEQ ID NO: 12616 - DNA, 20 bp, Homo Sapiens
ttatatttattaaattattt

SEQ ID NO: 12617 - DNA, 20 bp, Homo Sapiens
tatatttattaaattattta

SEQ ID NO: 12618 - DNA, 20 bp, Homo Sapiens
atatttattaaattatttat

SEQ ID NO: 12619 - DNA, 20 bp, Homo Sapiens
tatttattaaattatttatc

SEQ ID NO: 12620 - DNA, 20 bp, Homo Sapiens
atttattaaattatttatca

SEQ ID NO: 12621 - DNA, 20 bp, Homo Sapiens
tttattaaattatttatcaa

SEQ ID NO: 12622 - DNA, 20 bp, Homo Sapiens
ttattaaattatttatcaag

SEQ ID NO: 12623 - DNA, 20 bp, Homo Sapiens
tattaaattatttatcaagt

SEQ ID NO: 12624 - DNA, 20 bp, Homo Sapiens
attaaattatttatcaagtg

SEQ ID NO: 12625 - DNA, 20 bp, Homo Sapiens
ttaaattatttatcaagtgt

SEQ ID NO: 12626 - DNA, 20 bp, Homo Sapiens
taaattatttatcaagtgta

SEQ ID NO: 12627 - DNA, 20 bp, Homo Sapiens
aaattatttatcaagtgtat

SEQ ID NO: 12628 - DNA, 20 bp, Homo Sapiens
aattatttatcaagtgtatt

SEQ ID NO: 12629 - DNA, 20 bp, Homo Sapiens
attatttatcaagtgtattt

SEQ ID NO: 12630 - DNA, 20 bp, Homo Sapiens
ttatttatcaagtgtatttg

SEQ ID NO: 12631 - DNA, 20 bp, Homo Sapiens
tatttatcaagtgtatttga

SEQ ID NO: 12632 - DNA, 20 bp, Homo Sapiens
atttatcaagtgtatttgaa

SEQ ID NO: 12633 - DNA, 20 bp, Homo Sapiens
tttatcaagtgtatttgaaa

SEQ ID NO: 12634 - DNA, 20 bp, Homo Sapiens
ttatcaagtgtatttgaaaa

SEQ ID NO: 12635 - DNA, 20 bp, Homo Sapiens
tatcaagtgtatttgaaaaa

SEQ ID NO: 12636 - DNA, 20 bp, Homo Sapiens
atcaagtgtatttgaaaaat

SEQ ID NO: 12637 - DNA, 20 bp, Homo Sapiens
tcaagtgtatttgaaaaata

SEQ ID NO: 12638 - DNA, 20 bp, Homo Sapiens
caagtgtatttgaaaaatat

SEQ ID NO: 12639 - DNA, 20 bp, Homo Sapiens
aagtgtatttgaaaaatatt

SEQ ID NO: 12640 - DNA, 20 bp, Homo Sapiens
agtgtatttgaaaaatattt

SEQ ID NO: 12641 - DNA, 20 bp, Homo Sapiens
gtgtatttgaaaaatatttt

SEQ ID NO: 12642 - DNA, 20 bp, Homo Sapiens
tgtatttgaaaaatattttt

SEQ ID NO: 12643 - DNA, 20 bp, Homo Sapiens
gtatttgaaaaatattttta

SEQ ID NO: 12644 - DNA, 20 bp, Homo Sapiens
tatttgaaaaatatttttaa

SEQ ID NO: 12645 - DNA, 20 bp, Homo Sapiens
atttgaaaaatatttttaag

SEQ ID NO: 12646 - DNA, 20 bp, Homo Sapiens
tttgaaaaatatttttaagt

SEQ ID NO: 12647 - DNA, 20 bp, Homo Sapiens
ttgaaaaatatttttaagtg

SEQ ID NO: 12648 - DNA, 20 bp, Homo Sapiens
tgaaaaatatttttaagtgt

SEQ ID NO: 12649 - DNA, 20 bp, Homo Sapiens
gaaaaatatttttaagtgtt

SEQ ID NO: 12650 - DNA, 20 bp, Homo Sapiens
aaaaatatttttaagtgttc

SEQ ID NO: 12651 - DNA, 20 bp, Homo Sapiens
aaaatatttttaagtgttct

SEQ ID NO: 12652 - DNA, 20 bp, Homo Sapiens
aaatatttttaagtgttcta

SEQ ID NO: 12653 - DNA, 20 bp, Homo Sapiens
aatatttttaagtgttctaa

SEQ ID NO: 12654 - DNA, 20 bp, Homo Sapiens
atatttttaagtgttctaaa

SEQ ID NO: 12655 - DNA, 20 bp, Homo Sapiens
tatttttaagtgttctaaaa

SEQ ID NO: 12656 - DNA, 20 bp, Homo Sapiens
atttttaagtgttctaaaaa

SEQ ID NO: 12657 - DNA, 20 bp, Homo Sapiens
tttttaagtgttctaaaaat

SEQ ID NO: 12658 - DNA, 20 bp, Homo Sapiens
ttttaagtgttctaaaaata

SEQ ID NO: 12659 - DNA, 20 bp, Homo Sapiens
tttaagtgttctaaaaataa

SEQ ID NO: 12660 - DNA, 20 bp, Homo Sapiens
ttaagtgttctaaaaataaa

SEQ ID NO: 12661 - DNA, 20 bp, Homo Sapiens
taagtgttctaaaaataaaa

SEQ ID NO: 12662 - DNA, 20 bp, Homo Sapiens
aagtgttctaaaaataaaag

SEQ ID NO: 12663 - DNA, 20 bp, Homo Sapiens
agtgttctaaaaataaaagt

SEQ ID NO: 12664 - DNA, 20 bp, Homo Sapiens
gtgttctaaaaataaaagta

SEQ ID NO: 12665 - DNA, 20 bp, Homo Sapiens
tgttctaaaaataaaagtat

SEQ ID NO: 12666 - DNA, 20 bp, Homo Sapiens
gttctaaaaataaaagtatt

SEQ ID NO: 12667 - DNA, 20 bp, Homo Sapiens
ttctaaaaataaaagtattg

SEQ ID NO: 12668 - DNA, 20 bp, Homo Sapiens
tctaaaaataaaagtattga

SEQ ID NO: 12669 - DNA, 20 bp, Homo Sapiens
ctaaaaataaaagtattgaa

SEQ ID NO: 12670 - DNA, 20 bp, Homo Sapiens
taaaaataaaagtattgaat

SEQ ID NO: 12671 - DNA, 20 bp, Homo Sapiens
aaaaataaaagtattgaatt

SEQ ID NO: 12672 - DNA, 20 bp, Homo Sapiens
aaaataaaagtattgaatta

SEQ ID NO: 12673 - DNA, 20 bp, Homo Sapiens
aaataaaagtattgaattaa

SEQ ID NO: 12674 - DNA, 20 bp, Homo Sapiens
aataaaagtattgaattaaa

SEQ ID NO: 12675 - DNA, 20 bp, Homo Sapiens
ataaaagtattgaattaaag

SEQ ID NO: 12676 - DNA, 20 bp, Homo Sapiens
taaaagtattgaattaaagt

SEQ ID NO: 12677 - DNA, 20 bp, Homo Sapiens
aaaagtattgaattaaagtg

SEQ ID NO: 12678 - DNA, 20 bp, Homo Sapiens
aaagtattgaattaaagtga

SEQ ID NO: 12679 - DNA, 20 bp, Homo Sapiens
aagtattgaattaaagtgaa

SEQ ID NO: 12680 - DNA, 20 bp, Homo Sapiens
agtattgaattaaagtgaaa

SEQ ID NO: 12681 - DNA, 20 bp, Homo Sapiens
gtattgaattaaagtgaaaa

SEQ ID NO: 12682 - DNA, 20 bp, Homo Sapiens
tattgaattaaagtgaaaaa

SEQ ID NO: 12683 - DNA, 20 bp, Homo Sapiens
attgaattaaagtgaaaaaa

SEQ ID NO: 12684 - DNA, 20 bp, Homo Sapiens
ttgaattaaagtgaaaaaaa

SEQ ID NO: 12685 - DNA, 20 bp, Homo Sapiens
tgaattaaagtgaaaaaaaa

SEQ ID NO: 12686 - DNA, 20 bp, Homo Sapiens
cacttcctccccagacaggg

SEQ ID NO: 12687 - DNA, 20 bp, Homo Sapiens
acttcctccccagacagggg

SEQ ID NO: 12688 - DNA, 20 bp, Homo Sapiens
cttcctccccagacaggggt

SEQ ID NO: 12689 - DNA, 20 bp, Homo Sapiens
ttcctccccagacaggggta

SEQ ID NO: 12690 - DNA, 20 bp, Homo Sapiens
tcctccccagacaggggtag

SEQ ID NO: 12691 - DNA, 20 bp, Homo Sapiens
cctccccagacaggggtagt

SEQ ID NO: 12692 - DNA, 20 bp, Homo Sapiens
ctccccagacaggggtagtg

SEQ ID NO: 12693 - DNA, 20 bp, Homo Sapiens
tccccagacaggggtagtgc

SEQ ID NO: 12694 - DNA, 20 bp, Homo Sapiens
ccccagacaggggtagtgcg

SEQ ID NO: 12695 - DNA, 20 bp, Homo Sapiens
cccagacaggggtagtgcga

SEQ ID NO: 12696 - DNA, 20 bp, Homo Sapiens
ccagacaggggtagtgcgag

SEQ ID NO: 12697 - DNA, 20 bp, Homo Sapiens
cagacaggggtagtgcgagg

SEQ ID NO: 12698 - DNA, 20 bp, Homo Sapiens
agacaggggtagtgcgaggc

SEQ ID NO: 12699 - DNA, 20 bp, Homo Sapiens
gacaggggtagtgcgaggcc

SEQ ID NO: 12700 - DNA, 20 bp, Homo Sapiens
acaggggtagtgcgaggccg

SEQ ID NO: 12701 - DNA, 20 bp, Homo Sapiens
caggggtagtgcgaggccgg

SEQ ID NO: 12702 - DNA, 20 bp, Homo Sapiens
aggggtagtgcgaggccggg

SEQ ID NO: 12703 - DNA, 20 bp, Homo Sapiens
ggggtagtgcgaggccgggc

SEQ ID NO: 12704 - DNA, 20 bp, Homo Sapiens
gggtagtgcgaggccgggca

SEQ ID NO: 12705 - DNA, 20 bp, Homo Sapiens
ggtagtgcgaggccgggcac

SEQ ID NO: 12706 - DNA, 20 bp, Homo Sapiens
gtagtgcgaggccgggcaca

SEQ ID NO: 12707 - DNA, 20 bp, Homo Sapiens
tagtgcgaggccgggcacag

SEQ ID NO: 12708 - DNA, 20 bp, Homo Sapiens
agtgcgaggccgggcacagc

SEQ ID NO: 12709 - DNA, 20 bp, Homo Sapiens
gtgcgaggccgggcacagcc

SEQ ID NO: 12710 - DNA, 20 bp, Homo Sapiens
tgcgaggccgggcacagcct

SEQ ID NO: 12711 - DNA, 20 bp, Homo Sapiens
gcgaggccgggcacagcctt

SEQ ID NO: 12712 - DNA, 20 bp, Homo Sapiens
cgaggccgggcacagccttc

SEQ ID NO: 12713 - DNA, 20 bp, Homo Sapiens
gaggccgggcacagccttcc

SEQ ID NO: 12714 - DNA, 20 bp, Homo Sapiens
aggccgggcacagccttcct

SEQ ID NO: 12715 - DNA, 20 bp, Homo Sapiens
ggccgggcacagccttcctg

SEQ ID NO: 12716 - DNA, 20 bp, Homo Sapiens
gccgggcacagccttcctgt

SEQ ID NO: 12717 - DNA, 20 bp, Homo Sapiens
ccgggcacagccttcctgtg

SEQ ID NO: 12718 - DNA, 20 bp, Homo Sapiens
cgggcacagccttcctgtgt

SEQ ID NO: 12719 - DNA, 20 bp, Homo Sapiens
gggcacagccttcctgtgtg

SEQ ID NO: 12720 - DNA, 20 bp, Homo Sapiens
ggcacagccttcctgtgtgg

SEQ ID NO: 12721 - DNA, 20 bp, Homo Sapiens
gcacagccttcctgtgtggt

SEQ ID NO: 12722 - DNA, 20 bp, Homo Sapiens
cacagccttcctgtgtggtt

SEQ ID NO: 12723 - DNA, 20 bp, Homo Sapiens
acagccttcctgtgtggttt

SEQ ID NO: 12724 - DNA, 20 bp, Homo Sapiens
cagccttcctgtgtggtttt

SEQ ID NO: 12725 - DNA, 20 bp, Homo Sapiens
agccttcctgtgtggtttta

SEQ ID NO: 12726 - DNA, 20 bp, Homo Sapiens
gccttcctgtgtggttttac

SEQ ID NO: 12727 - DNA, 20 bp, Homo Sapiens
ccttcctgtgtggttttacc

SEQ ID NO: 12728 - DNA, 20 bp, Homo Sapiens
cttcctgtgtggttttaccg

SEQ ID NO: 12729 - DNA, 20 bp, Homo Sapiens
ttcctgtgtggttttaccgc

SEQ ID NO: 12730 - DNA, 20 bp, Homo Sapiens
tcctgtgtggttttaccgcc

SEQ ID NO: 12731 - DNA, 20 bp, Homo Sapiens
cctgtgtggttttaccgccc

SEQ ID NO: 12732 - DNA, 20 bp, Homo Sapiens
ctgtgtggttttaccgccca

SEQ ID NO: 12733 - DNA, 20 bp, Homo Sapiens
tgtgtggttttaccgcccag

SEQ ID NO: 12734 - DNA, 20 bp, Homo Sapiens
gtgtggttttaccgcccaga

SEQ ID NO: 12735 - DNA, 20 bp, Homo Sapiens
tgtggttttaccgcccagag

SEQ ID NO: 12736 - DNA, 20 bp, Homo Sapiens
gtggttttaccgcccagaga

SEQ ID NO: 12737 - DNA, 20 bp, Homo Sapiens
tggttttaccgcccagagag

SEQ ID NO: 12738 - DNA, 20 bp, Homo Sapiens
ggttttaccgcccagagagc

SEQ ID NO: 12739 - DNA, 20 bp, Homo Sapiens
gttttaccgcccagagagcg

SEQ ID NO: 12740 - DNA, 20 bp, Homo Sapiens
ttttaccgcccagagagcgt

SEQ ID NO: 12741 - DNA, 20 bp, Homo Sapiens
tttaccgcccagagagcgtc

SEQ ID NO: 12742 - DNA, 20 bp, Homo Sapiens
ttaccgcccagagagcgtca

SEQ ID NO: 12743 - DNA, 20 bp, Homo Sapiens
taccgcccagagagcgtcat

SEQ ID NO: 12744 - DNA, 20 bp, Homo Sapiens
accgcccagagagcgtcatg

SEQ ID NO: 12745 - DNA, 20 bp, Homo Sapiens
ccgcccagagagcgtcatgg

SEQ ID NO: 12746 - DNA, 20 bp, Homo Sapiens
cgcccagagagcgtcatgga

SEQ ID NO: 12747 - DNA, 20 bp, Homo Sapiens
gcccagagagcgtcatggac

SEQ ID NO: 12748 - DNA, 20 bp, Homo Sapiens
cccagagagcgtcatggacc

SEQ ID NO: 12749 - DNA, 20 bp, Homo Sapiens
ccagagagcgtcatggacct

SEQ ID NO: 12750 - DNA, 20 bp, Homo Sapiens
cagagagcgtcatggacctg

SEQ ID NO: 12751 - DNA, 20 bp, Homo Sapiens
agagagcgtcatggacctgg

SEQ ID NO: 12752 - DNA, 20 bp, Homo Sapiens
gagagcgtcatggacctggg

SEQ ID NO: 12753 - DNA, 20 bp, Homo Sapiens
agagcgtcatggacctgggg

SEQ ID NO: 12754 - DNA, 20 bp, Homo Sapiens
gagcgtcatggacctgggga

SEQ ID NO: 12755 - DNA, 20 bp, Homo Sapiens
agcgtcatggacctggggaa

SEQ ID NO: 12756 - DNA, 20 bp, Homo Sapiens
gcgtcatggacctggggaaa

SEQ ID NO: 12757 - DNA, 20 bp, Homo Sapiens
cgtcatggacctggggaaac

SEQ ID NO: 12758 - DNA, 20 bp, Homo Sapiens
gtcatggacctggggaaacc

SEQ ID NO: 12759 - DNA, 20 bp, Homo Sapiens
tcatggacctggggaaacca

SEQ ID NO: 12760 - DNA, 20 bp, Homo Sapiens
catggacctggggaaaccaa

SEQ ID NO: 12761 - DNA, 20 bp, Homo Sapiens
atggacctggggaaaccaat

SEQ ID NO: 12762 - DNA, 20 bp, Homo Sapiens
tggacctggggaaaccaatg

SEQ ID NO: 12763 - DNA, 20 bp, Homo Sapiens
ggacctggggaaaccaatga

SEQ ID NO: 12764 - DNA, 20 bp, Homo Sapiens
gacctggggaaaccaatgaa

SEQ ID NO: 12765 - DNA, 20 bp, Homo Sapiens
acctggggaaaccaatgaaa

SEQ ID NO: 12766 - DNA, 20 bp, Homo Sapiens
cctggggaaaccaatgaaaa

SEQ ID NO: 12767 - DNA, 20 bp, Homo Sapiens
ctggggaaaccaatgaaaag

SEQ ID NO: 12768 - DNA, 20 bp, Homo Sapiens
tggggaaaccaatgaaaagc

SEQ ID NO: 12769 - DNA, 20 bp, Homo Sapiens
ggggaaaccaatgaaaagcg

SEQ ID NO: 12770 - DNA, 20 bp, Homo Sapiens
gggaaaccaatgaaaagcgt

SEQ ID NO: 12771 - DNA, 20 bp, Homo Sapiens
ggaaaccaatgaaaagcgtg

SEQ ID NO: 12772 - DNA, 20 bp, Homo Sapiens
gaaaccaatgaaaagcgtgc

SEQ ID NO: 12773 - DNA, 20 bp, Homo Sapiens
aaaccaatgaaaagcgtgct

SEQ ID NO: 12774 - DNA, 20 bp, Homo Sapiens
aaccaatgaaaagcgtgctg

SEQ ID NO: 12775 - DNA, 20 bp, Homo Sapiens
accaatgaaaagcgtgctgg

SEQ ID NO: 12776 - DNA, 20 bp, Homo Sapiens
ccaatgaaaagcgtgctggt

SEQ ID NO: 12777 - DNA, 20 bp, Homo Sapiens
caatgaaaagcgtgctggtg

SEQ ID NO: 12778 - DNA, 20 bp, Homo Sapiens
aatgaaaagcgtgctggtgg

SEQ ID NO: 12779 - DNA, 20 bp, Homo Sapiens
atgaaaagcgtgctggtggt

SEQ ID NO: 12780 - DNA, 20 bp, Homo Sapiens
tgaaaagcgtgctggtggtg

SEQ ID NO: 12781 - DNA, 20 bp, Homo Sapiens
gaaaagcgtgctggtggtgg

SEQ ID NO: 12782 - DNA, 20 bp, Homo Sapiens
aaaagcgtgctggtggtggc

SEQ ID NO: 12783 - DNA, 20 bp, Homo Sapiens
aaagcgtgctggtggtggct

SEQ ID NO: 12784 - DNA, 20 bp, Homo Sapiens
aagcgtgctggtggtggctc

SEQ ID NO: 12785 - DNA, 20 bp, Homo Sapiens
agcgtgctggtggtggctct

SEQ ID NO: 12786 - DNA, 20 bp, Homo Sapiens
gcgtgctggtggtggctctc

SEQ ID NO: 12787 - DNA, 20 bp, Homo Sapiens
cgtgctggtggtggctctcc

SEQ ID NO: 12788 - DNA, 20 bp, Homo Sapiens
gtgctggtggtggctctcct

SEQ ID NO: 12789 - DNA, 20 bp, Homo Sapiens
tgctggtggtggctctcctt

SEQ ID NO: 12790 - DNA, 20 bp, Homo Sapiens
gctggtggtggctctccttg

SEQ ID NO: 12791 - DNA, 20 bp, Homo Sapiens
ctggtggtggctctccttgt

SEQ ID NO: 12792 - DNA, 20 bp, Homo Sapiens
tggtggtggctctccttgtc

SEQ ID NO: 12793 - DNA, 20 bp, Homo Sapiens
ggtggtggctctccttgtca

SEQ ID NO: 12794 - DNA, 20 bp, Homo Sapiens
gtggtggctctccttgtcat

SEQ ID NO: 12795 - DNA, 20 bp, Homo Sapiens
tggtggctctccttgtcatt

SEQ ID NO: 12796 - DNA, 20 bp, Homo Sapiens
ggtggctctccttgtcattt

SEQ ID NO: 12797 - DNA, 20 bp, Homo Sapiens
gtggctctccttgtcatttt

SEQ ID NO: 12798 - DNA, 20 bp, Homo Sapiens
tggctctccttgtcattttc

SEQ ID NO: 12799 - DNA, 20 bp, Homo Sapiens
ggctctccttgtcattttcc

SEQ ID NO: 12800 - DNA, 20 bp, Homo Sapiens
gctctccttgtcattttcca

SEQ ID NO: 12801 - DNA, 20 bp, Homo Sapiens
ctctccttgtcattttccag

SEQ ID NO: 12802 - DNA, 20 bp, Homo Sapiens
tctccttgtcattttccagg

SEQ ID NO: 12803 - DNA, 20 bp, Homo Sapiens
ctccttgtcattttccaggt

SEQ ID NO: 12804 - DNA, 20 bp, Homo Sapiens
tccttgtcattttccaggta

SEQ ID NO: 12805 - DNA, 20 bp, Homo Sapiens
ccttgtcattttccaggtat

SEQ ID NO: 12806 - DNA, 20 bp, Homo Sapiens
cttgtcattttccaggtatg

SEQ ID NO: 12807 - DNA, 20 bp, Homo Sapiens
ttgtcattttccaggtatgc

SEQ ID NO: 12808 - DNA, 20 bp, Homo Sapiens
tgtcattttccaggtatgcc

SEQ ID NO: 12809 - DNA, 20 bp, Homo Sapiens
gtcattttccaggtatgcct

SEQ ID NO: 12810 - DNA, 20 bp, Homo Sapiens
tcattttccaggtatgcctg

SEQ ID NO: 12811 - DNA, 20 bp, Homo Sapiens
cattttccaggtatgcctgt

SEQ ID NO: 12812 - DNA, 20 bp, Homo Sapiens
attttccaggtatgcctgtg

SEQ ID NO: 12813 - DNA, 20 bp, Homo Sapiens
ttttccaggtatgcctgtgt

SEQ ID NO: 12814 - DNA, 20 bp, Homo Sapiens
tttccaggtatgcctgtgtc

SEQ ID NO: 12815 - DNA, 20 bp, Homo Sapiens
ttccaggtatgcctgtgtca

SEQ ID NO: 12816 - DNA, 20 bp, Homo Sapiens
tccaggtatgcctgtgtcaa

SEQ ID NO: 12817 - DNA, 20 bp, Homo Sapiens
ccaggtatgcctgtgtcaag

SEQ ID NO: 12818 - DNA, 20 bp, Homo Sapiens
caggtatgcctgtgtcaaga

SEQ ID NO: 12819 - DNA, 20 bp, Homo Sapiens
aggtatgcctgtgtcaagat

SEQ ID NO: 12820 - DNA, 20 bp, Homo Sapiens
ggtatgcctgtgtcaagatg

SEQ ID NO: 12821 - DNA, 20 bp, Homo Sapiens
gtatgcctgtgtcaagatga

SEQ ID NO: 12822 - DNA, 20 bp, Homo Sapiens
tatgcctgtgtcaagatgag

SEQ ID NO: 12823 - DNA, 20 bp, Homo Sapiens
atgcctgtgtcaagatgagg

SEQ ID NO: 12824 - DNA, 20 bp, Homo Sapiens
tgcctgtgtcaagatgaggt

SEQ ID NO: 12825 - DNA, 20 bp, Homo Sapiens
gcctgtgtcaagatgaggtc

SEQ ID NO: 12826 - DNA, 20 bp, Homo Sapiens
cctgtgtcaagatgaggtca

SEQ ID NO: 12827 - DNA, 20 bp, Homo Sapiens
ctgtgtcaagatgaggtcac

SEQ ID NO: 12828 - DNA, 20 bp, Homo Sapiens
tgtgtcaagatgaggtcacg

SEQ ID NO: 12829 - DNA, 20 bp, Homo Sapiens
gtgtcaagatgaggtcacgg

SEQ ID NO: 12830 - DNA, 20 bp, Homo Sapiens
tgtcaagatgaggtcacgga

SEQ ID NO: 12831 - DNA, 20 bp, Homo Sapiens
gtcaagatgaggtcacggac

SEQ ID NO: 12832 - DNA, 20 bp, Homo Sapiens
tcaagatgaggtcacggacg

SEQ ID NO: 12833 - DNA, 20 bp, Homo Sapiens
caagatgaggtcacggacga

SEQ ID NO: 12834 - DNA, 20 bp, Homo Sapiens
aagatgaggtcacggacgat

SEQ ID NO: 12835 - DNA, 20 bp, Homo Sapiens
agatgaggtcacggacgatt

SEQ ID NO: 12836 - DNA, 20 bp, Homo Sapiens
gatgaggtcacggacgatta

SEQ ID NO: 12837 - DNA, 20 bp, Homo Sapiens
atgaggtcacggacgattac

SEQ ID NO: 12838 - DNA, 20 bp, Homo Sapiens
tgaggtcacggacgattaca

SEQ ID NO: 12839 - DNA, 20 bp, Homo Sapiens
gaggtcacggacgattacat

SEQ ID NO: 12840 - DNA, 20 bp, Homo Sapiens
aggtcacggacgattacatc

SEQ ID NO: 12841 - DNA, 20 bp, Homo Sapiens
ggtcacggacgattacatcg

SEQ ID NO: 12842 - DNA, 20 bp, Homo Sapiens
gtcacggacgattacatcgg

SEQ ID NO: 12843 - DNA, 20 bp, Homo Sapiens
tcacggacgattacatcgga

SEQ ID NO: 12844 - DNA, 20 bp, Homo Sapiens
cacggacgattacatcggag

SEQ ID NO: 12845 - DNA, 20 bp, Homo Sapiens
acggacgattacatcggaga

SEQ ID NO: 12846 - DNA, 20 bp, Homo Sapiens
cggacgattacatcggagac

SEQ ID NO: 12847 - DNA, 20 bp, Homo Sapiens
ggacgattacatcggagaca

SEQ ID NO: 12848 - DNA, 20 bp, Homo Sapiens
gacgattacatcggagacaa

SEQ ID NO: 12849 - DNA, 20 bp, Homo Sapiens
acgattacatcggagacaac

SEQ ID NO: 12850 - DNA, 20 bp, Homo Sapiens
cgattacatcggagacaaca

SEQ ID NO: 12851 - DNA, 20 bp, Homo Sapiens
gattacatcggagacaacac

SEQ ID NO: 12852 - DNA, 20 bp, Homo Sapiens
attacatcggagacaacacc

SEQ ID NO: 12853 - DNA, 20 bp, Homo Sapiens
ttacatcggagacaacacca

SEQ ID NO: 12854 - DNA, 20 bp, Homo Sapiens
tacatcggagacaacaccac

SEQ ID NO: 12855 - DNA, 20 bp, Homo Sapiens
acatcggagacaacaccaca

SEQ ID NO: 12856 - DNA, 20 bp, Homo Sapiens
catcggagacaacaccacag

SEQ ID NO: 12857 - DNA, 20 bp, Homo Sapiens
atcggagacaacaccacagt

SEQ ID NO: 12858 - DNA, 20 bp, Homo Sapiens
tcggagacaacaccacagtg

SEQ ID NO: 12859 - DNA, 20 bp, Homo Sapiens
cggagacaacaccacagtgg

SEQ ID NO: 12860 - DNA, 20 bp, Homo Sapiens
ggagacaacaccacagtgga

SEQ ID NO: 12861 - DNA, 20 bp, Homo Sapiens
gagacaacaccacagtggac

SEQ ID NO: 12862 - DNA, 20 bp, Homo Sapiens
agacaacaccacagtggact

SEQ ID NO: 12863 - DNA, 20 bp, Homo Sapiens
gacaacaccacagtggacta

SEQ ID NO: 12864 - DNA, 20 bp, Homo Sapiens
acaacaccacagtggactac

SEQ ID NO: 12865 - DNA, 20 bp, Homo Sapiens
caacaccacagtggactaca

SEQ ID NO: 12866 - DNA, 20 bp, Homo Sapiens
aacaccacagtggactacac

SEQ ID NO: 12867 - DNA, 20 bp, Homo Sapiens
acaccacagtggactacact

SEQ ID NO: 12868 - DNA, 20 bp, Homo Sapiens
caccacagtggactacactt

SEQ ID NO: 12869 - DNA, 20 bp, Homo Sapiens
accacagtggactacacttt

SEQ ID NO: 12870 - DNA, 20 bp, Homo Sapiens
ccacagtggactacactttg

SEQ ID NO: 12871 - DNA, 20 bp, Homo Sapiens
cacagtggactacactttgt

SEQ ID NO: 12872 - DNA, 20 bp, Homo Sapiens
acagtggactacactttgtt

SEQ ID NO: 12873 - DNA, 20 bp, Homo Sapiens
cagtggactacactttgttc

SEQ ID NO: 12874 - DNA, 20 bp, Homo Sapiens
agtggactacactttgttcg

SEQ ID NO: 12875 - DNA, 20 bp, Homo Sapiens
gtggactacactttgttcga

SEQ ID NO: 12876 - DNA, 20 bp, Homo Sapiens
tggactacactttgttcgag

SEQ ID NO: 12877 - DNA, 20 bp, Homo Sapiens
ggactacactttgttcgagt

SEQ ID NO: 12878 - DNA, 20 bp, Homo Sapiens
gactacactttgttcgagtc

SEQ ID NO: 12879 - DNA, 20 bp, Homo Sapiens
actacactttgttcgagtct

SEQ ID NO: 12880 - DNA, 20 bp, Homo Sapiens
ctacactttgttcgagtctt

SEQ ID NO: 12881 - DNA, 20 bp, Homo Sapiens
tacactttgttcgagtcttt

SEQ ID NO: 12882 - DNA, 20 bp, Homo Sapiens
acactttgttcgagtctttg

SEQ ID NO: 12883 - DNA, 20 bp, Homo Sapiens
cactttgttcgagtctttgt

SEQ ID NO: 12884 - DNA, 20 bp, Homo Sapiens
actttgttcgagtctttgtg

SEQ ID NO: 12885 - DNA, 20 bp, Homo Sapiens
ctttgttcgagtctttgtgc

SEQ ID NO: 12886 - DNA, 20 bp, Homo Sapiens
tttgttcgagtctttgtgct

SEQ ID NO: 12887 - DNA, 20 bp, Homo Sapiens
ttgttcgagtctttgtgctc

SEQ ID NO: 12888 - DNA, 20 bp, Homo Sapiens
tgttcgagtctttgtgctcc

SEQ ID NO: 12889 - DNA, 20 bp, Homo Sapiens
gttcgagtctttgtgctcca

SEQ ID NO: 12890 - DNA, 20 bp, Homo Sapiens
ttcgagtctttgtgctccaa

SEQ ID NO: 12891 - DNA, 20 bp, Homo Sapiens
tcgagtctttgtgctccaag

SEQ ID NO: 12892 - DNA, 20 bp, Homo Sapiens
cgagtctttgtgctccaaga

SEQ ID NO: 12893 - DNA, 20 bp, Homo Sapiens
gagtctttgtgctccaagaa

SEQ ID NO: 12894 - DNA, 20 bp, Homo Sapiens
agtctttgtgctccaagaag

SEQ ID NO: 12895 - DNA, 20 bp, Homo Sapiens
gtctttgtgctccaagaagg

SEQ ID NO: 12896 - DNA, 20 bp, Homo Sapiens
tctttgtgctccaagaagga

SEQ ID NO: 12897 - DNA, 20 bp, Homo Sapiens
ctttgtgctccaagaaggac

SEQ ID NO: 12898 - DNA, 20 bp, Homo Sapiens
tttgtgctccaagaaggacg

SEQ ID NO: 12899 - DNA, 20 bp, Homo Sapiens
ttgtgctccaagaaggacgt

SEQ ID NO: 12900 - DNA, 20 bp, Homo Sapiens
tgtgctccaagaaggacgtg

SEQ ID NO: 12901 - DNA, 20 bp, Homo Sapiens
gtgctccaagaaggacgtgc

SEQ ID NO: 12902 - DNA, 20 bp, Homo Sapiens
tgctccaagaaggacgtgcg

SEQ ID NO: 12903 - DNA, 20 bp, Homo Sapiens
gctccaagaaggacgtgcgg

SEQ ID NO: 12904 - DNA, 20 bp, Homo Sapiens
ctccaagaaggacgtgcgga

SEQ ID NO: 12905 - DNA, 20 bp, Homo Sapiens
tccaagaaggacgtgcggaa

SEQ ID NO: 12906 - DNA, 20 bp, Homo Sapiens
ccaagaaggacgtgcggaac

SEQ ID NO: 12907 - DNA, 20 bp, Homo Sapiens
caagaaggacgtgcggaact

SEQ ID NO: 12908 - DNA, 20 bp, Homo Sapiens
aagaaggacgtgcggaactt

SEQ ID NO: 12909 - DNA, 20 bp, Homo Sapiens
agaaggacgtgcggaacttt

SEQ ID NO: 12910 - DNA, 20 bp, Homo Sapiens
gaaggacgtgcggaacttta

SEQ ID NO: 12911 - DNA, 20 bp, Homo Sapiens
aaggacgtgcggaactttaa

SEQ ID NO: 12912 - DNA, 20 bp, Homo Sapiens
aggacgtgcggaactttaaa

SEQ ID NO: 12913 - DNA, 20 bp, Homo Sapiens
ggacgtgcggaactttaaag

SEQ ID NO: 12914 - DNA, 20 bp, Homo Sapiens
gacgtgcggaactttaaagc

SEQ ID NO: 12915 - DNA, 20 bp, Homo Sapiens
acgtgcggaactttaaagcc

SEQ ID NO: 12916 - DNA, 20 bp, Homo Sapiens
cgtgcggaactttaaagcct

SEQ ID NO: 12917 - DNA, 20 bp, Homo Sapiens
gtgcggaactttaaagcctg

SEQ ID NO: 12918 - DNA, 20 bp, Homo Sapiens
tgcggaactttaaagcctgg

SEQ ID NO: 12919 - DNA, 20 bp, Homo Sapiens
gcggaactttaaagcctggt

SEQ ID NO: 12920 - DNA, 20 bp, Homo Sapiens
cggaactttaaagcctggtt

SEQ ID NO: 12921 - DNA, 20 bp, Homo Sapiens
ggaactttaaagcctggttc

SEQ ID NO: 12922 - DNA, 20 bp, Homo Sapiens
gaactttaaagcctggttcc

SEQ ID NO: 12923 - DNA, 20 bp, Homo Sapiens
aactttaaagcctggttcct

SEQ ID NO: 12924 - DNA, 20 bp, Homo Sapiens
actttaaagcctggttcctc

SEQ ID NO: 12925 - DNA, 20 bp, Homo Sapiens
ctttaaagcctggttcctcc

SEQ ID NO: 12926 - DNA, 20 bp, Homo Sapiens
tttaaagcctggttcctccc

SEQ ID NO: 12927 - DNA, 20 bp, Homo Sapiens
ttaaagcctggttcctccct

SEQ ID NO: 12928 - DNA, 20 bp, Homo Sapiens
taaagcctggttcctcccta

SEQ ID NO: 12929 - DNA, 20 bp, Homo Sapiens
aaagcctggttcctccctat

SEQ ID NO: 12930 - DNA, 20 bp, Homo Sapiens
aagcctggttcctccctatc

SEQ ID NO: 12931 - DNA, 20 bp, Homo Sapiens
agcctggttcctccctatca

SEQ ID NO: 12932 - DNA, 20 bp, Homo Sapiens
gcctggttcctccctatcat

SEQ ID NO: 12933 - DNA, 20 bp, Homo Sapiens
cctggttcctccctatcatg

SEQ ID NO: 12934 - DNA, 20 bp, Homo Sapiens
ctggttcctccctatcatgt

SEQ ID NO: 12935 - DNA, 20 bp, Homo Sapiens
tggttcctccctatcatgta

SEQ ID NO: 12936 - DNA, 20 bp, Homo Sapiens
ggttcctccctatcatgtac

SEQ ID NO: 12937 - DNA, 20 bp, Homo Sapiens
gttcctccctatcatgtact

SEQ ID NO: 12938 - DNA, 20 bp, Homo Sapiens
ttcctccctatcatgtactc

SEQ ID NO: 12939 - DNA, 20 bp, Homo Sapiens
tcctccctatcatgtactcc

SEQ ID NO: 12940 - DNA, 20 bp, Homo Sapiens
cctccctatcatgtactcca

SEQ ID NO: 12941 - DNA, 20 bp, Homo Sapiens
ctccctatcatgtactccat

SEQ ID NO: 12942 - DNA, 20 bp, Homo Sapiens
tccctatcatgtactccatc

SEQ ID NO: 12943 - DNA, 20 bp, Homo Sapiens
ccctatcatgtactccatca

SEQ ID NO: 12944 - DNA, 20 bp, Homo Sapiens
cctatcatgtactccatcat

SEQ ID NO: 12945 - DNA, 20 bp, Homo Sapiens
ctatcatgtactccatcatt

SEQ ID NO: 12946 - DNA, 20 bp, Homo Sapiens
tatcatgtactccatcattt

SEQ ID NO: 12947 - DNA, 20 bp, Homo Sapiens
atcatgtactccatcatttg

SEQ ID NO: 12948 - DNA, 20 bp, Homo Sapiens
tcatgtactccatcatttgt

SEQ ID NO: 12949 - DNA, 20 bp, Homo Sapiens
catgtactccatcatttgtt

SEQ ID NO: 12950 - DNA, 20 bp, Homo Sapiens
atgtactccatcatttgttt

SEQ ID NO: 12951 - DNA, 20 bp, Homo Sapiens
tgtactccatcatttgtttc

SEQ ID NO: 12952 - DNA, 20 bp, Homo Sapiens
gtactccatcatttgtttcg

SEQ ID NO: 12953 - DNA, 20 bp, Homo Sapiens
tactccatcatttgtttcgt

SEQ ID NO: 12954 - DNA, 20 bp, Homo Sapiens
actccatcatttgtttcgtg

SEQ ID NO: 12955 - DNA, 20 bp, Homo Sapiens
ctccatcatttgtttcgtgg

SEQ ID NO: 12956 - DNA, 20 bp, Homo Sapiens
tccatcatttgtttcgtggg

SEQ ID NO: 12957 - DNA, 20 bp, Homo Sapiens
ccatcatttgtttcgtgggc

SEQ ID NO: 12958 - DNA, 20 bp, Homo Sapiens
catcatttgtttcgtgggcc

SEQ ID NO: 12959 - DNA, 20 bp, Homo Sapiens
atcatttgtttcgtgggcct

SEQ ID NO: 12960 - DNA, 20 bp, Homo Sapiens
tcatttgtttcgtgggccta

SEQ ID NO: 12961 - DNA, 20 bp, Homo Sapiens
catttgtttcgtgggcctac

SEQ ID NO: 12962 - DNA, 20 bp, Homo Sapiens
atttgtttcgtgggcctact

SEQ ID NO: 12963 - DNA, 20 bp, Homo Sapiens
tttgtttcgtgggcctactg

SEQ ID NO: 12964 - DNA, 20 bp, Homo Sapiens
ttgtttcgtgggcctactgg

SEQ ID NO: 12965 - DNA, 20 bp, Homo Sapiens
tgtttcgtgggcctactggg

SEQ ID NO: 12966 - DNA, 20 bp, Homo Sapiens
gtttcgtgggcctactgggc

SEQ ID NO: 12967 - DNA, 20 bp, Homo Sapiens
tttcgtgggcctactgggca

SEQ ID NO: 12968 - DNA, 20 bp, Homo Sapiens
ttcgtgggcctactgggcaa

SEQ ID NO: 12969 - DNA, 20 bp, Homo Sapiens
tcgtgggcctactgggcaat

SEQ ID NO: 12970 - DNA, 20 bp, Homo Sapiens
cgtgggcctactgggcaatg

SEQ ID NO: 12971 - DNA, 20 bp, Homo Sapiens
gtgggcctactgggcaatgg

SEQ ID NO: 12972 - DNA, 20 bp, Homo Sapiens
tgggcctactgggcaatggg

SEQ ID NO: 12973 - DNA, 20 bp, Homo Sapiens
gggcctactgggcaatgggc

SEQ ID NO: 12974 - DNA, 20 bp, Homo Sapiens
ggcctactgggcaatgggct

SEQ ID NO: 12975 - DNA, 20 bp, Homo Sapiens
gcctactgggcaatgggctg

SEQ ID NO: 12976 - DNA, 20 bp, Homo Sapiens
cctactgggcaatgggctgg

SEQ ID NO: 12977 - DNA, 20 bp, Homo Sapiens
ctactgggcaatgggctggt

SEQ ID NO: 12978 - DNA, 20 bp, Homo Sapiens
tactgggcaatgggctggtc

SEQ ID NO: 12979 - DNA, 20 bp, Homo Sapiens
actgggcaatgggctggtcg

SEQ ID NO: 12980 - DNA, 20 bp, Homo Sapiens
ctgggcaatgggctggtcgt

SEQ ID NO: 12981 - DNA, 20 bp, Homo Sapiens
tgggcaatgggctggtcgtg

SEQ ID NO: 12982 - DNA, 20 bp, Homo Sapiens
gggcaatgggctggtcgtgt

SEQ ID NO: 12983 - DNA, 20 bp, Homo Sapiens
ggcaatgggctggtcgtgtt

SEQ ID NO: 12984 - DNA, 20 bp, Homo Sapiens
gcaatgggctggtcgtgttg

SEQ ID NO: 12985 - DNA, 20 bp, Homo Sapiens
caatgggctggtcgtgttga

SEQ ID NO: 12986 - DNA, 20 bp, Homo Sapiens
aatgggctggtcgtgttgac

SEQ ID NO: 12987 - DNA, 20 bp, Homo Sapiens
atgggctggtcgtgttgacc

SEQ ID NO: 12988 - DNA, 20 bp, Homo Sapiens
tgggctggtcgtgttgacct

SEQ ID NO: 12989 - DNA, 20 bp, Homo Sapiens
gggctggtcgtgttgaccta

SEQ ID NO: 12990 - DNA, 20 bp, Homo Sapiens
ggctggtcgtgttgacctat

SEQ ID NO: 12991 - DNA, 20 bp, Homo Sapiens
gctggtcgtgttgacctata

SEQ ID NO: 12992 - DNA, 20 bp, Homo Sapiens
ctggtcgtgttgacctatat

SEQ ID NO: 12993 - DNA, 20 bp, Homo Sapiens
tggtcgtgttgacctatatc

SEQ ID NO: 12994 - DNA, 20 bp, Homo Sapiens
ggtcgtgttgacctatatct

SEQ ID NO: 12995 - DNA, 20 bp, Homo Sapiens
gtcgtgttgacctatatcta

SEQ ID NO: 12996 - DNA, 20 bp, Homo Sapiens
tcgtgttgacctatatctat

SEQ ID NO: 12997 - DNA, 20 bp, Homo Sapiens
cgtgttgacctatatctatt

SEQ ID NO: 12998 - DNA, 20 bp, Homo Sapiens
gtgttgacctatatctattt

SEQ ID NO: 12999 - DNA, 20 bp, Homo Sapiens
tgttgacctatatctatttc

SEQ ID NO: 13000 - DNA, 20 bp, Homo Sapiens
gttgacctatatctatttca

SEQ ID NO: 13001 - DNA, 20 bp, Homo Sapiens
ttgacctatatctatttcaa

SEQ ID NO: 13002 - DNA, 20 bp, Homo Sapiens
tgacctatatctatttcaag

SEQ ID NO: 13003 - DNA, 20 bp, Homo Sapiens
gacctatatctatttcaaga

SEQ ID NO: 13004 - DNA, 20 bp, Homo Sapiens
acctatatctatttcaagag

SEQ ID NO: 13005 - DNA, 20 bp, Homo Sapiens
cctatatctatttcaagagg

SEQ ID NO: 13006 - DNA, 20 bp, Homo Sapiens
ctatatctatttcaagaggc

SEQ ID NO: 13007 - DNA, 20 bp, Homo Sapiens
tatatctatttcaagaggct

SEQ ID NO: 13008 - DNA, 20 bp, Homo Sapiens
atatctatttcaagaggctc

SEQ ID NO: 13009 - DNA, 20 bp, Homo Sapiens
tatctatttcaagaggctca

SEQ ID NO: 13010 - DNA, 20 bp, Homo Sapiens
atctatttcaagaggctcaa

SEQ ID NO: 13011 - DNA, 20 bp, Homo Sapiens
tctatttcaagaggctcaag

SEQ ID NO: 13012 - DNA, 20 bp, Homo Sapiens
ctatttcaagaggctcaaga

SEQ ID NO: 13013 - DNA, 20 bp, Homo Sapiens
tatttcaagaggctcaagac

SEQ ID NO: 13014 - DNA, 20 bp, Homo Sapiens
atttcaagaggctcaagacc

SEQ ID NO: 13015 - DNA, 20 bp, Homo Sapiens
tttcaagaggctcaagacca

SEQ ID NO: 13016 - DNA, 20 bp, Homo Sapiens
ttcaagaggctcaagaccat

SEQ ID NO: 13017 - DNA, 20 bp, Homo Sapiens
tcaagaggctcaagaccatg

SEQ ID NO: 13018 - DNA, 20 bp, Homo Sapiens
caagaggctcaagaccatga

SEQ ID NO: 13019 - DNA, 20 bp, Homo Sapiens
aagaggctcaagaccatgac

SEQ ID NO: 13020 - DNA, 20 bp, Homo Sapiens
agaggctcaagaccatgacc

SEQ ID NO: 13021 - DNA, 20 bp, Homo Sapiens
gaggctcaagaccatgaccg

SEQ ID NO: 13022 - DNA, 20 bp, Homo Sapiens
aggctcaagaccatgaccga

SEQ ID NO: 13023 - DNA, 20 bp, Homo Sapiens
ggctcaagaccatgaccgat

SEQ ID NO: 13024 - DNA, 20 bp, Homo Sapiens
gctcaagaccatgaccgata

SEQ ID NO: 13025 - DNA, 20 bp, Homo Sapiens
ctcaagaccatgaccgatac

SEQ ID NO: 13026 - DNA, 20 bp, Homo Sapiens
tcaagaccatgaccgatacc

SEQ ID NO: 13027 - DNA, 20 bp, Homo Sapiens
caagaccatgaccgatacct

SEQ ID NO: 13028 - DNA, 20 bp, Homo Sapiens
aagaccatgaccgataccta

SEQ ID NO: 13029 - DNA, 20 bp, Homo Sapiens
agaccatgaccgatacctac

SEQ ID NO: 13030 - DNA, 20 bp, Homo Sapiens
gaccatgaccgatacctacc

SEQ ID NO: 13031 - DNA, 20 bp, Homo Sapiens
accatgaccgatacctacct

SEQ ID NO: 13032 - DNA, 20 bp, Homo Sapiens
ccatgaccgatacctacctg

SEQ ID NO: 13033 - DNA, 20 bp, Homo Sapiens
catgaccgatacctacctgc

SEQ ID NO: 13034 - DNA, 20 bp, Homo Sapiens
atgaccgatacctacctgct

SEQ ID NO: 13035 - DNA, 20 bp, Homo Sapiens
tgaccgatacctacctgctc

SEQ ID NO: 13036 - DNA, 20 bp, Homo Sapiens
gaccgatacctacctgctca

SEQ ID NO: 13037 - DNA, 20 bp, Homo Sapiens
accgatacctacctgctcaa

SEQ ID NO: 13038 - DNA, 20 bp, Homo Sapiens
ccgatacctacctgctcaac

SEQ ID NO: 13039 - DNA, 20 bp, Homo Sapiens
cgatacctacctgctcaacc

SEQ ID NO: 13040 - DNA, 20 bp, Homo Sapiens
gatacctacctgctcaacct

SEQ ID NO: 13041 - DNA, 20 bp, Homo Sapiens
atacctacctgctcaacctg

SEQ ID NO: 13042 - DNA, 20 bp, Homo Sapiens
tacctacctgctcaacctgg

SEQ ID NO: 13043 - DNA, 20 bp, Homo Sapiens
acctacctgctcaacctggc

SEQ ID NO: 13044 - DNA, 20 bp, Homo Sapiens
cctacctgctcaacctggcg

SEQ ID NO: 13045 - DNA, 20 bp, Homo Sapiens
ctacctgctcaacctggcgg

SEQ ID NO: 13046 - DNA, 20 bp, Homo Sapiens
tacctgctcaacctggcggt

SEQ ID NO: 13047 - DNA, 20 bp, Homo Sapiens
acctgctcaacctggcggtg

SEQ ID NO: 13048 - DNA, 20 bp, Homo Sapiens
cctgctcaacctggcggtgg

SEQ ID NO: 13049 - DNA, 20 bp, Homo Sapiens
ctgctcaacctggcggtggc

SEQ ID NO: 13050 - DNA, 20 bp, Homo Sapiens
tgctcaacctggcggtggca

SEQ ID NO: 13051 - DNA, 20 bp, Homo Sapiens
gctcaacctggcggtggcag

SEQ ID NO: 13052 - DNA, 20 bp, Homo Sapiens
ctcaacctggcggtggcaga

SEQ ID NO: 13053 - DNA, 20 bp, Homo Sapiens
tcaacctggcggtggcagac

SEQ ID NO: 13054 - DNA, 20 bp, Homo Sapiens
caacctggcggtggcagaca

SEQ ID NO: 13055 - DNA, 20 bp, Homo Sapiens
aacctggcggtggcagacat

SEQ ID NO: 13056 - DNA, 20 bp, Homo Sapiens
acctggcggtggcagacatc

SEQ ID NO: 13057 - DNA, 20 bp, Homo Sapiens
cctggcggtggcagacatcc

SEQ ID NO: 13058 - DNA, 20 bp, Homo Sapiens
ctggcggtggcagacatcct

SEQ ID NO: 13059 - DNA, 20 bp, Homo Sapiens
tggcggtggcagacatcctc

SEQ ID NO: 13060 - DNA, 20 bp, Homo Sapiens
ggcggtggcagacatcctct

SEQ ID NO: 13061 - DNA, 20 bp, Homo Sapiens
gcggtggcagacatcctctt

SEQ ID NO: 13062 - DNA, 20 bp, Homo Sapiens
cggtggcagacatcctcttc

SEQ ID NO: 13063 - DNA, 20 bp, Homo Sapiens
ggtggcagacatcctcttcc

SEQ ID NO: 13064 - DNA, 20 bp, Homo Sapiens
gtggcagacatcctcttcct

SEQ ID NO: 13065 - DNA, 20 bp, Homo Sapiens
tggcagacatcctcttcctc

SEQ ID NO: 13066 - DNA, 20 bp, Homo Sapiens
ggcagacatcctcttcctcc

SEQ ID NO: 13067 - DNA, 20 bp, Homo Sapiens
gcagacatcctcttcctcct

SEQ ID NO: 13068 - DNA, 20 bp, Homo Sapiens
cagacatcctcttcctcctg

SEQ ID NO: 13069 - DNA, 20 bp, Homo Sapiens
agacatcctcttcctcctga

SEQ ID NO: 13070 - DNA, 20 bp, Homo Sapiens
gacatcctcttcctcctgac

SEQ ID NO: 13071 - DNA, 20 bp, Homo Sapiens
acatcctcttcctcctgacc

SEQ ID NO: 13072 - DNA, 20 bp, Homo Sapiens
catcctcttcctcctgaccc

SEQ ID NO: 13073 - DNA, 20 bp, Homo Sapiens
atcctcttcctcctgaccct

SEQ ID NO: 13074 - DNA, 20 bp, Homo Sapiens
tcctcttcctcctgaccctt

SEQ ID NO: 13075 - DNA, 20 bp, Homo Sapiens
cctcttcctcctgacccttc

SEQ ID NO: 13076 - DNA, 20 bp, Homo Sapiens
ctcttcctcctgacccttcc

SEQ ID NO: 13077 - DNA, 20 bp, Homo Sapiens
tcttcctcctgacccttccc

SEQ ID NO: 13078 - DNA, 20 bp, Homo Sapiens
cttcctcctgacccttccct

SEQ ID NO: 13079 - DNA, 20 bp, Homo Sapiens
ttcctcctgacccttccctt

SEQ ID NO: 13080 - DNA, 20 bp, Homo Sapiens
tcctcctgacccttcccttc

SEQ ID NO: 13081 - DNA, 20 bp, Homo Sapiens
cctcctgacccttcccttct

SEQ ID NO: 13082 - DNA, 20 bp, Homo Sapiens
ctcctgacccttcccttctg

SEQ ID NO: 13083 - DNA, 20 bp, Homo Sapiens
tcctgacccttcccttctgg

SEQ ID NO: 13084 - DNA, 20 bp, Homo Sapiens
cctgacccttcccttctggg

SEQ ID NO: 13085 - DNA, 20 bp, Homo Sapiens
ctgacccttcccttctgggc

SEQ ID NO: 13086 - DNA, 20 bp, Homo Sapiens
tgacccttcccttctgggcc

SEQ ID NO: 13087 - DNA, 20 bp, Homo Sapiens
gacccttcccttctgggcct

SEQ ID NO: 13088 - DNA, 20 bp, Homo Sapiens
acccttcccttctgggccta

SEQ ID NO: 13089 - DNA, 20 bp, Homo Sapiens
cccttcccttctgggcctac

SEQ ID NO: 13090 - DNA, 20 bp, Homo Sapiens
ccttcccttctgggcctaca

SEQ ID NO: 13091 - DNA, 20 bp, Homo Sapiens
cttcccttctgggcctacag

SEQ ID NO: 13092 - DNA, 20 bp, Homo Sapiens
ttcccttctgggcctacagc

SEQ ID NO: 13093 - DNA, 20 bp, Homo Sapiens
tcccttctgggcctacagcg

SEQ ID NO: 13094 - DNA, 20 bp, Homo Sapiens
cccttctgggcctacagcgc

SEQ ID NO: 13095 - DNA, 20 bp, Homo Sapiens
ccttctgggcctacagcgcg

SEQ ID NO: 13096 - DNA, 20 bp, Homo Sapiens
cttctgggcctacagcgcgg

SEQ ID NO: 13097 - DNA, 20 bp, Homo Sapiens
ttctgggcctacagcgcggc

SEQ ID NO: 13098 - DNA, 20 bp, Homo Sapiens
tctgggcctacagcgcggcc

SEQ ID NO: 13099 - DNA, 20 bp, Homo Sapiens
ctgggcctacagcgcggcca

SEQ ID NO: 13100 - DNA, 20 bp, Homo Sapiens
tgggcctacagcgcggccaa

SEQ ID NO: 13101 - DNA, 20 bp, Homo Sapiens
gggcctacagcgcggccaag

SEQ ID NO: 13102 - DNA, 20 bp, Homo Sapiens
ggcctacagcgcggccaagt

SEQ ID NO: 13103 - DNA, 20 bp, Homo Sapiens
gcctacagcgcggccaagtc

SEQ ID NO: 13104 - DNA, 20 bp, Homo Sapiens
cctacagcgcggccaagtcc

SEQ ID NO: 13105 - DNA, 20 bp, Homo Sapiens
ctacagcgcggccaagtcct

SEQ ID NO: 13106 - DNA, 20 bp, Homo Sapiens
tacagcgcggccaagtcctg

SEQ ID NO: 13107 - DNA, 20 bp, Homo Sapiens
acagcgcggccaagtcctgg

SEQ ID NO: 13108 - DNA, 20 bp, Homo Sapiens
cagcgcggccaagtcctggg

SEQ ID NO: 13109 - DNA, 20 bp, Homo Sapiens
agcgcggccaagtcctgggt

SEQ ID NO: 13110 - DNA, 20 bp, Homo Sapiens
gcgcggccaagtcctgggtc

SEQ ID NO: 13111 - DNA, 20 bp, Homo Sapiens
cgcggccaagtcctgggtct

SEQ ID NO: 13112 - DNA, 20 bp, Homo Sapiens
gcggccaagtcctgggtctt

SEQ ID NO: 13113 - DNA, 20 bp, Homo Sapiens
cggccaagtcctgggtcttc

SEQ ID NO: 13114 - DNA, 20 bp, Homo Sapiens
ggccaagtcctgggtcttcg

SEQ ID NO: 13115 - DNA, 20 bp, Homo Sapiens
gccaagtcctgggtcttcgg

SEQ ID NO: 13116 - DNA, 20 bp, Homo Sapiens
ccaagtcctgggtcttcggt

SEQ ID NO: 13117 - DNA, 20 bp, Homo Sapiens
caagtcctgggtcttcggtg

SEQ ID NO: 13118 - DNA, 20 bp, Homo Sapiens
aagtcctgggtcttcggtgt

SEQ ID NO: 13119 - DNA, 20 bp, Homo Sapiens
agtcctgggtcttcggtgtc

SEQ ID NO: 13120 - DNA, 20 bp, Homo Sapiens
gtcctgggtcttcggtgtcc

SEQ ID NO: 13121 - DNA, 20 bp, Homo Sapiens
tcctgggtcttcggtgtcca

SEQ ID NO: 13122 - DNA, 20 bp, Homo Sapiens
cctgggtcttcggtgtccac

SEQ ID NO: 13123 - DNA, 20 bp, Homo Sapiens
ctgggtcttcggtgtccact

SEQ ID NO: 13124 - DNA, 20 bp, Homo Sapiens
tgggtcttcggtgtccactt

SEQ ID NO: 13125 - DNA, 20 bp, Homo Sapiens
gggtcttcggtgtccacttt

SEQ ID NO: 13126 - DNA, 20 bp, Homo Sapiens
ggtcttcggtgtccactttt

SEQ ID NO: 13127 - DNA, 20 bp, Homo Sapiens
gtcttcggtgtccacttttg

SEQ ID NO: 13128 - DNA, 20 bp, Homo Sapiens
tcttcggtgtccacttttgc

SEQ ID NO: 13129 - DNA, 20 bp, Homo Sapiens
cttcggtgtccacttttgca

SEQ ID NO: 13130 - DNA, 20 bp, Homo Sapiens
ttcggtgtccacttttgcaa

SEQ ID NO: 13131 - DNA, 20 bp, Homo Sapiens
tcggtgtccacttttgcaag

SEQ ID NO: 13132 - DNA, 20 bp, Homo Sapiens
cggtgtccacttttgcaagc

SEQ ID NO: 13133 - DNA, 20 bp, Homo Sapiens
ggtgtccacttttgcaagct

SEQ ID NO: 13134 - DNA, 20 bp, Homo Sapiens
gtgtccacttttgcaagctc

SEQ ID NO: 13135 - DNA, 20 bp, Homo Sapiens
tgtccacttttgcaagctca

SEQ ID NO: 13136 - DNA, 20 bp, Homo Sapiens
gtccacttttgcaagctcat

SEQ ID NO: 13137 - DNA, 20 bp, Homo Sapiens
tccacttttgcaagctcatc

SEQ ID NO: 13138 - DNA, 20 bp, Homo Sapiens
ccacttttgcaagctcatct

SEQ ID NO: 13139 - DNA, 20 bp, Homo Sapiens
cacttttgcaagctcatctt

SEQ ID NO: 13140 - DNA, 20 bp, Homo Sapiens
acttttgcaagctcatcttt

SEQ ID NO: 13141 - DNA, 20 bp, Homo Sapiens
cttttgcaagctcatctttg

SEQ ID NO: 13142 - DNA, 20 bp, Homo Sapiens
ttttgcaagctcatctttgc

SEQ ID NO: 13143 - DNA, 20 bp, Homo Sapiens
tttgcaagctcatctttgcc

SEQ ID NO: 13144 - DNA, 20 bp, Homo Sapiens
ttgcaagctcatctttgcca

SEQ ID NO: 13145 - DNA, 20 bp, Homo Sapiens
tgcaagctcatctttgccat

SEQ ID NO: 13146 - DNA, 20 bp, Homo Sapiens
gcaagctcatctttgccatc

SEQ ID NO: 13147 - DNA, 20 bp, Homo Sapiens
caagctcatctttgccatct

SEQ ID NO: 13148 - DNA, 20 bp, Homo Sapiens
aagctcatctttgccatcta

SEQ ID NO: 13149 - DNA, 20 bp, Homo Sapiens
agctcatctttgccatctac

SEQ ID NO: 13150 - DNA, 20 bp, Homo Sapiens
gctcatctttgccatctaca

SEQ ID NO: 13151 - DNA, 20 bp, Homo Sapiens
ctcatctttgccatctacaa

SEQ ID NO: 13152 - DNA, 20 bp, Homo Sapiens
tcatctttgccatctacaag

SEQ ID NO: 13153 - DNA, 20 bp, Homo Sapiens
catctttgccatctacaaga

SEQ ID NO: 13154 - DNA, 20 bp, Homo Sapiens
atctttgccatctacaagat

SEQ ID NO: 13155 - DNA, 20 bp, Homo Sapiens
tctttgccatctacaagatg

SEQ ID NO: 13156 - DNA, 20 bp, Homo Sapiens
ctttgccatctacaagatga

SEQ ID NO: 13157 - DNA, 20 bp, Homo Sapiens
tttgccatctacaagatgag

SEQ ID NO: 13158 - DNA, 20 bp, Homo Sapiens
ttgccatctacaagatgagc

SEQ ID NO: 13159 - DNA, 20 bp, Homo Sapiens
tgccatctacaagatgagct

SEQ ID NO: 13160 - DNA, 20 bp, Homo Sapiens
gccatctacaagatgagctt

SEQ ID NO: 13161 - DNA, 20 bp, Homo Sapiens
ccatctacaagatgagcttc

SEQ ID NO: 13162 - DNA, 20 bp, Homo Sapiens
catctacaagatgagcttct

SEQ ID NO: 13163 - DNA, 20 bp, Homo Sapiens
atctacaagatgagcttctt

SEQ ID NO: 13164 - DNA, 20 bp, Homo Sapiens
tctacaagatgagcttcttc

SEQ ID NO: 13165 - DNA, 20 bp, Homo Sapiens
ctacaagatgagcttcttca

SEQ ID NO: 13166 - DNA, 20 bp, Homo Sapiens
tacaagatgagcttcttcag

SEQ ID NO: 13167 - DNA, 20 bp, Homo Sapiens
acaagatgagcttcttcagt

SEQ ID NO: 13168 - DNA, 20 bp, Homo Sapiens
caagatgagcttcttcagtg

SEQ ID NO: 13169 - DNA, 20 bp, Homo Sapiens
aagatgagcttcttcagtgg

SEQ ID NO: 13170 - DNA, 20 bp, Homo Sapiens
agatgagcttcttcagtggc

SEQ ID NO: 13171 - DNA, 20 bp, Homo Sapiens
gatgagcttcttcagtggca

SEQ ID NO: 13172 - DNA, 20 bp, Homo Sapiens
atgagcttcttcagtggcat

SEQ ID NO: 13173 - DNA, 20 bp, Homo Sapiens
tgagcttcttcagtggcatg

SEQ ID NO: 13174 - DNA, 20 bp, Homo Sapiens
gagcttcttcagtggcatgc

SEQ ID NO: 13175 - DNA, 20 bp, Homo Sapiens
agcttcttcagtggcatgct

SEQ ID NO: 13176 - DNA, 20 bp, Homo Sapiens
gcttcttcagtggcatgctc

SEQ ID NO: 13177 - DNA, 20 bp, Homo Sapiens
cttcttcagtggcatgctcc

SEQ ID NO: 13178 - DNA, 20 bp, Homo Sapiens
ttcttcagtggcatgctcct

SEQ ID NO: 13179 - DNA, 20 bp, Homo Sapiens
tcttcagtggcatgctccta

SEQ ID NO: 13180 - DNA, 20 bp, Homo Sapiens
cttcagtggcatgctcctac

SEQ ID NO: 13181 - DNA, 20 bp, Homo Sapiens
ttcagtggcatgctcctact

SEQ ID NO: 13182 - DNA, 20 bp, Homo Sapiens
tcagtggcatgctcctactt

SEQ ID NO: 13183 - DNA, 20 bp, Homo Sapiens
cagtggcatgctcctacttc

SEQ ID NO: 13184 - DNA, 20 bp, Homo Sapiens
agtggcatgctcctacttct

SEQ ID NO: 13185 - DNA, 20 bp, Homo Sapiens
gtggcatgctcctacttctt

SEQ ID NO: 13186 - DNA, 20 bp, Homo Sapiens
tggcatgctcctacttcttt

SEQ ID NO: 13187 - DNA, 20 bp, Homo Sapiens
ggcatgctcctacttctttg

SEQ ID NO: 13188 - DNA, 20 bp, Homo Sapiens
gcatgctcctacttctttgc

SEQ ID NO: 13189 - DNA, 20 bp, Homo Sapiens
catgctcctacttctttgca

SEQ ID NO: 13190 - DNA, 20 bp, Homo Sapiens
atgctcctacttctttgcat

SEQ ID NO: 13191 - DNA, 20 bp, Homo Sapiens
tgctcctacttctttgcatc

SEQ ID NO: 13192 - DNA, 20 bp, Homo Sapiens
gctcctacttctttgcatca

SEQ ID NO: 13193 - DNA, 20 bp, Homo Sapiens
ctcctacttctttgcatcag

SEQ ID NO: 13194 - DNA, 20 bp, Homo Sapiens
tcctacttctttgcatcagc

SEQ ID NO: 13195 - DNA, 20 bp, Homo Sapiens
cctacttctttgcatcagca

SEQ ID NO: 13196 - DNA, 20 bp, Homo Sapiens
ctacttctttgcatcagcat

SEQ ID NO: 13197 - DNA, 20 bp, Homo Sapiens
tacttctttgcatcagcatt

SEQ ID NO: 13198 - DNA, 20 bp, Homo Sapiens
acttctttgcatcagcattg

SEQ ID NO: 13199 - DNA, 20 bp, Homo Sapiens
cttctttgcatcagcattga

SEQ ID NO: 13200 - DNA, 20 bp, Homo Sapiens
ttctttgcatcagcattgac

SEQ ID NO: 13201 - DNA, 20 bp, Homo Sapiens
tctttgcatcagcattgacc

SEQ ID NO: 13202 - DNA, 20 bp, Homo Sapiens
ctttgcatcagcattgaccg

SEQ ID NO: 13203 - DNA, 20 bp, Homo Sapiens
tttgcatcagcattgaccgc

SEQ ID NO: 13204 - DNA, 20 bp, Homo Sapiens
ttgcatcagcattgaccgct

SEQ ID NO: 13205 - DNA, 20 bp, Homo Sapiens
tgcatcagcattgaccgcta

SEQ ID NO: 13206 - DNA, 20 bp, Homo Sapiens
gcatcagcattgaccgctac

SEQ ID NO: 13207 - DNA, 20 bp, Homo Sapiens
catcagcattgaccgctacg

SEQ ID NO: 13208 - DNA, 20 bp, Homo Sapiens
atcagcattgaccgctacgt

SEQ ID NO: 13209 - DNA, 20 bp, Homo Sapiens
tcagcattgaccgctacgtg

SEQ ID NO: 13210 - DNA, 20 bp, Homo Sapiens
cagcattgaccgctacgtgg

SEQ ID NO: 13211 - DNA, 20 bp, Homo Sapiens
agcattgaccgctacgtggc

SEQ ID NO: 13212 - DNA, 20 bp, Homo Sapiens
gcattgaccgctacgtggcc

SEQ ID NO: 13213 - DNA, 20 bp, Homo Sapiens
cattgaccgctacgtggcca

SEQ ID NO: 13214 - DNA, 20 bp, Homo Sapiens
attgaccgctacgtggccat

SEQ ID NO: 13215 - DNA, 20 bp, Homo Sapiens
ttgaccgctacgtggccatc

SEQ ID NO: 13216 - DNA, 20 bp, Homo Sapiens
tgaccgctacgtggccatcg

SEQ ID NO: 13217 - DNA, 20 bp, Homo Sapiens
gaccgctacgtggccatcgt

SEQ ID NO: 13218 - DNA, 20 bp, Homo Sapiens
accgctacgtggccatcgtc

SEQ ID NO: 13219 - DNA, 20 bp, Homo Sapiens
ccgctacgtggccatcgtcc

SEQ ID NO: 13220 - DNA, 20 bp, Homo Sapiens
cgctacgtggccatcgtcca

SEQ ID NO: 13221 - DNA, 20 bp, Homo Sapiens
gctacgtggccatcgtccag

SEQ ID NO: 13222 - DNA, 20 bp, Homo Sapiens
ctacgtggccatcgtccagg

SEQ ID NO: 13223 - DNA, 20 bp, Homo Sapiens
tacgtggccatcgtccaggc

SEQ ID NO: 13224 - DNA, 20 bp, Homo Sapiens
acgtggccatcgtccaggct

SEQ ID NO: 13225 - DNA, 20 bp, Homo Sapiens
cgtggccatcgtccaggctg

SEQ ID NO: 13226 - DNA, 20 bp, Homo Sapiens
gtggccatcgtccaggctgt

SEQ ID NO: 13227 - DNA, 20 bp, Homo Sapiens
tggccatcgtccaggctgtc

SEQ ID NO: 13228 - DNA, 20 bp, Homo Sapiens
ggccatcgtccaggctgtct

SEQ ID NO: 13229 - DNA, 20 bp, Homo Sapiens
gccatcgtccaggctgtctc

SEQ ID NO: 13230 - DNA, 20 bp, Homo Sapiens
ccatcgtccaggctgtctca

SEQ ID NO: 13231 - DNA, 20 bp, Homo Sapiens
catcgtccaggctgtctcag

SEQ ID NO: 13232 - DNA, 20 bp, Homo Sapiens
atcgtccaggctgtctcagc

SEQ ID NO: 13233 - DNA, 20 bp, Homo Sapiens
tcgtccaggctgtctcagct

SEQ ID NO: 13234 - DNA, 20 bp, Homo Sapiens
cgtccaggctgtctcagctc

SEQ ID NO: 13235 - DNA, 20 bp, Homo Sapiens
gtccaggctgtctcagctca

SEQ ID NO: 13236 - DNA, 20 bp, Homo Sapiens
tccaggctgtctcagctcac

SEQ ID NO: 13237 - DNA, 20 bp, Homo Sapiens
ccaggctgtctcagctcacc

SEQ ID NO: 13238 - DNA, 20 bp, Homo Sapiens
caggctgtctcagctcaccg

SEQ ID NO: 13239 - DNA, 20 bp, Homo Sapiens
aggctgtctcagctcaccgc

SEQ ID NO: 13240 - DNA, 20 bp, Homo Sapiens
ggctgtctcagctcaccgcc

SEQ ID NO: 13241 - DNA, 20 bp, Homo Sapiens
gctgtctcagctcaccgcca

SEQ ID NO: 13242 - DNA, 20 bp, Homo Sapiens
ctgtctcagctcaccgccac

SEQ ID NO: 13243 - DNA, 20 bp, Homo Sapiens
tgtctcagctcaccgccacc

SEQ ID NO: 13244 - DNA, 20 bp, Homo Sapiens
gtctcagctcaccgccaccg

SEQ ID NO: 13245 - DNA, 20 bp, Homo Sapiens
tctcagctcaccgccaccgt

SEQ ID NO: 13246 - DNA, 20 bp, Homo Sapiens
ctcagctcaccgccaccgtg

SEQ ID NO: 13247 - DNA, 20 bp, Homo Sapiens
tcagctcaccgccaccgtgc

SEQ ID NO: 13248 - DNA, 20 bp, Homo Sapiens
cagctcaccgccaccgtgcc

SEQ ID NO: 13249 - DNA, 20 bp, Homo Sapiens
agctcaccgccaccgtgccc

SEQ ID NO: 13250 - DNA, 20 bp, Homo Sapiens
gctcaccgccaccgtgcccg

SEQ ID NO: 13251 - DNA, 20 bp, Homo Sapiens
ctcaccgccaccgtgcccgc

SEQ ID NO: 13252 - DNA, 20 bp, Homo Sapiens
tcaccgccaccgtgcccgcg

SEQ ID NO: 13253 - DNA, 20 bp, Homo Sapiens
caccgccaccgtgcccgcgt

SEQ ID NO: 13254 - DNA, 20 bp, Homo Sapiens
accgccaccgtgcccgcgtc

SEQ ID NO: 13255 - DNA, 20 bp, Homo Sapiens
ccgccaccgtgcccgcgtcc

SEQ ID NO: 13256 - DNA, 20 bp, Homo Sapiens
cgccaccgtgcccgcgtcct

SEQ ID NO: 13257 - DNA, 20 bp, Homo Sapiens
gccaccgtgcccgcgtcctt

SEQ ID NO: 13258 - DNA, 20 bp, Homo Sapiens
ccaccgtgcccgcgtccttc

SEQ ID NO: 13259 - DNA, 20 bp, Homo Sapiens
caccgtgcccgcgtccttct

SEQ ID NO: 13260 - DNA, 20 bp, Homo Sapiens
accgtgcccgcgtccttctc

SEQ ID NO: 13261 - DNA, 20 bp, Homo Sapiens
ccgtgcccgcgtccttctca

SEQ ID NO: 13262 - DNA, 20 bp, Homo Sapiens
cgtgcccgcgtccttctcat

SEQ ID NO: 13263 - DNA, 20 bp, Homo Sapiens
gtgcccgcgtccttctcatc

SEQ ID NO: 13264 - DNA, 20 bp, Homo Sapiens
tgcccgcgtccttctcatca

SEQ ID NO: 13265 - DNA, 20 bp, Homo Sapiens
gcccgcgtccttctcatcag

SEQ ID NO: 13266 - DNA, 20 bp, Homo Sapiens
cccgcgtccttctcatcagc

SEQ ID NO: 13267 - DNA, 20 bp, Homo Sapiens
ccgcgtccttctcatcagca

SEQ ID NO: 13268 - DNA, 20 bp, Homo Sapiens
cgcgtccttctcatcagcaa

SEQ ID NO: 13269 - DNA, 20 bp, Homo Sapiens
gcgtccttctcatcagcaag

SEQ ID NO: 13270 - DNA, 20 bp, Homo Sapiens
cgtccttctcatcagcaagc

SEQ ID NO: 13271 - DNA, 20 bp, Homo Sapiens
gtccttctcatcagcaagct

SEQ ID NO: 13272 - DNA, 20 bp, Homo Sapiens
tccttctcatcagcaagctg

SEQ ID NO: 13273 - DNA, 20 bp, Homo Sapiens
ccttctcatcagcaagctgt

SEQ ID NO: 13274 - DNA, 20 bp, Homo Sapiens
cttctcatcagcaagctgtc

SEQ ID NO: 13275 - DNA, 20 bp, Homo Sapiens
ttctcatcagcaagctgtcc

SEQ ID NO: 13276 - DNA, 20 bp, Homo Sapiens
tctcatcagcaagctgtcct

SEQ ID NO: 13277 - DNA, 20 bp, Homo Sapiens
ctcatcagcaagctgtcctg

SEQ ID NO: 13278 - DNA, 20 bp, Homo Sapiens
tcatcagcaagctgtcctgt

SEQ ID NO: 13279 - DNA, 20 bp, Homo Sapiens
catcagcaagctgtcctgtg

SEQ ID NO: 13280 - DNA, 20 bp, Homo Sapiens
atcagcaagctgtcctgtgt

SEQ ID NO: 13281 - DNA, 20 bp, Homo Sapiens
tcagcaagctgtcctgtgtg

SEQ ID NO: 13282 - DNA, 20 bp, Homo Sapiens
cagcaagctgtcctgtgtgg

SEQ ID NO: 13283 - DNA, 20 bp, Homo Sapiens
agcaagctgtcctgtgtggg

SEQ ID NO: 13284 - DNA, 20 bp, Homo Sapiens
gcaagctgtcctgtgtgggc

SEQ ID NO: 13285 - DNA, 20 bp, Homo Sapiens
caagctgtcctgtgtgggca

SEQ ID NO: 13286 - DNA, 20 bp, Homo Sapiens
aagctgtcctgtgtgggcat

SEQ ID NO: 13287 - DNA, 20 bp, Homo Sapiens
agctgtcctgtgtgggcatc

SEQ ID NO: 13288 - DNA, 20 bp, Homo Sapiens
gctgtcctgtgtgggcatct

SEQ ID NO: 13289 - DNA, 20 bp, Homo Sapiens
ctgtcctgtgtgggcatctg

SEQ ID NO: 13290 - DNA, 20 bp, Homo Sapiens
tgtcctgtgtgggcatctgg

SEQ ID NO: 13291 - DNA, 20 bp, Homo Sapiens
gtcctgtgtgggcatctgga

SEQ ID NO: 13292 - DNA, 20 bp, Homo Sapiens
tcctgtgtgggcatctggat

SEQ ID NO: 13293 - DNA, 20 bp, Homo Sapiens
cctgtgtgggcatctggata

SEQ ID NO: 13294 - DNA, 20 bp, Homo Sapiens
ctgtgtgggcatctggatac

SEQ ID NO: 13295 - DNA, 20 bp, Homo Sapiens
tgtgtgggcatctggatact

SEQ ID NO: 13296 - DNA, 20 bp, Homo Sapiens
gtgtgggcatctggatacta

SEQ ID NO: 13297 - DNA, 20 bp, Homo Sapiens
tgtgggcatctggatactag

SEQ ID NO: 13298 - DNA, 20 bp, Homo Sapiens
gtgggcatctggatactagc

SEQ ID NO: 13299 - DNA, 20 bp, Homo Sapiens
tgggcatctggatactagcc

SEQ ID NO: 13300 - DNA, 20 bp, Homo Sapiens
gggcatctggatactagcca

SEQ ID NO: 13301 - DNA, 20 bp, Homo Sapiens
ggcatctggatactagccac

SEQ ID NO: 13302 - DNA, 20 bp, Homo Sapiens
gcatctggatactagccaca

SEQ ID NO: 13303 - DNA, 20 bp, Homo Sapiens
catctggatactagccacag

SEQ ID NO: 13304 - DNA, 20 bp, Homo Sapiens
atctggatactagccacagt

SEQ ID NO: 13305 - DNA, 20 bp, Homo Sapiens
tctggatactagccacagtg

SEQ ID NO: 13306 - DNA, 20 bp, Homo Sapiens
ctggatactagccacagtgc

SEQ ID NO: 13307 - DNA, 20 bp, Homo Sapiens
tggatactagccacagtgct

SEQ ID NO: 13308 - DNA, 20 bp, Homo Sapiens
ggatactagccacagtgctc

SEQ ID NO: 13309 - DNA, 20 bp, Homo Sapiens
gatactagccacagtgctct

SEQ ID NO: 13310 - DNA, 20 bp, Homo Sapiens
atactagccacagtgctctc

SEQ ID NO: 13311 - DNA, 20 bp, Homo Sapiens
tactagccacagtgctctcc

SEQ ID NO: 13312 - DNA, 20 bp, Homo Sapiens
actagccacagtgctctcca

SEQ ID NO: 13313 - DNA, 20 bp, Homo Sapiens
ctagccacagtgctctccat

SEQ ID NO: 13314 - DNA, 20 bp, Homo Sapiens
tagccacagtgctctccatc

SEQ ID NO: 13315 - DNA, 20 bp, Homo Sapiens
agccacagtgctctccatcc

SEQ ID NO: 13316 - DNA, 20 bp, Homo Sapiens
gccacagtgctctccatccc

SEQ ID NO: 13317 - DNA, 20 bp, Homo Sapiens
ccacagtgctctccatccca

SEQ ID NO: 13318 - DNA, 20 bp, Homo Sapiens
cacagtgctctccatcccag

SEQ ID NO: 13319 - DNA, 20 bp, Homo Sapiens
acagtgctctccatcccaga

SEQ ID NO: 13320 - DNA, 20 bp, Homo Sapiens
cagtgctctccatcccagag

SEQ ID NO: 13321 - DNA, 20 bp, Homo Sapiens
agtgctctccatcccagagc

SEQ ID NO: 13322 - DNA, 20 bp, Homo Sapiens
gtgctctccatcccagagct

SEQ ID NO: 13323 - DNA, 20 bp, Homo Sapiens
tgctctccatcccagagctc

SEQ ID NO: 13324 - DNA, 20 bp, Homo Sapiens
gctctccatcccagagctcc

SEQ ID NO: 13325 - DNA, 20 bp, Homo Sapiens
ctctccatcccagagctcct

SEQ ID NO: 13326 - DNA, 20 bp, Homo Sapiens
tctccatcccagagctcctg

SEQ ID NO: 13327 - DNA, 20 bp, Homo Sapiens
ctccatcccagagctcctgt

SEQ ID NO: 13328 - DNA, 20 bp, Homo Sapiens
tccatcccagagctcctgta

SEQ ID NO: 13329 - DNA, 20 bp, Homo Sapiens
ccatcccagagctcctgtac

SEQ ID NO: 13330 - DNA, 20 bp, Homo Sapiens
catcccagagctcctgtaca

SEQ ID NO: 13331 - DNA, 20 bp, Homo Sapiens
atcccagagctcctgtacag

SEQ ID NO: 13332 - DNA, 20 bp, Homo Sapiens
tcccagagctcctgtacagt

SEQ ID NO: 13333 - DNA, 20 bp, Homo Sapiens
cccagagctcctgtacagtg

SEQ ID NO: 13334 - DNA, 20 bp, Homo Sapiens
ccagagctcctgtacagtga

SEQ ID NO: 13335 - DNA, 20 bp, Homo Sapiens
cagagctcctgtacagtgac

SEQ ID NO: 13336 - DNA, 20 bp, Homo Sapiens
agagctcctgtacagtgacc

SEQ ID NO: 13337 - DNA, 20 bp, Homo Sapiens
gagctcctgtacagtgacct

SEQ ID NO: 13338 - DNA, 20 bp, Homo Sapiens
agctcctgtacagtgacctc

SEQ ID NO: 13339 - DNA, 20 bp, Homo Sapiens
gctcctgtacagtgacctcc

SEQ ID NO: 13340 - DNA, 20 bp, Homo Sapiens
ctcctgtacagtgacctcca

SEQ ID NO: 13341 - DNA, 20 bp, Homo Sapiens
tcctgtacagtgacctccag

SEQ ID NO: 13342 - DNA, 20 bp, Homo Sapiens
cctgtacagtgacctccaga

SEQ ID NO: 13343 - DNA, 20 bp, Homo Sapiens
ctgtacagtgacctccagag

SEQ ID NO: 13344 - DNA, 20 bp, Homo Sapiens
tgtacagtgacctccagagg

SEQ ID NO: 13345 - DNA, 20 bp, Homo Sapiens
gtacagtgacctccagagga

SEQ ID NO: 13346 - DNA, 20 bp, Homo Sapiens
tacagtgacctccagaggag

SEQ ID NO: 13347 - DNA, 20 bp, Homo Sapiens
acagtgacctccagaggagc

SEQ ID NO: 13348 - DNA, 20 bp, Homo Sapiens
cagtgacctccagaggagca

SEQ ID NO: 13349 - DNA, 20 bp, Homo Sapiens
agtgacctccagaggagcag

SEQ ID NO: 13350 - DNA, 20 bp, Homo Sapiens
gtgacctccagaggagcagc

SEQ ID NO: 13351 - DNA, 20 bp, Homo Sapiens
tgacctccagaggagcagca

SEQ ID NO: 13352 - DNA, 20 bp, Homo Sapiens
gacctccagaggagcagcag

SEQ ID NO: 13353 - DNA, 20 bp, Homo Sapiens
acctccagaggagcagcagt

SEQ ID NO: 13354 - DNA, 20 bp, Homo Sapiens
cctccagaggagcagcagtg

SEQ ID NO: 13355 - DNA, 20 bp, Homo Sapiens
ctccagaggagcagcagtga

SEQ ID NO: 13356 - DNA, 20 bp, Homo Sapiens
tccagaggagcagcagtgag

SEQ ID NO: 13357 - DNA, 20 bp, Homo Sapiens
ccagaggagcagcagtgagc

SEQ ID NO: 13358 - DNA, 20 bp, Homo Sapiens
cagaggagcagcagtgagca

SEQ ID NO: 13359 - DNA, 20 bp, Homo Sapiens
agaggagcagcagtgagcaa

SEQ ID NO: 13360 - DNA, 20 bp, Homo Sapiens
gaggagcagcagtgagcaag

SEQ ID NO: 13361 - DNA, 20 bp, Homo Sapiens
aggagcagcagtgagcaagc

SEQ ID NO: 13362 - DNA, 20 bp, Homo Sapiens
ggagcagcagtgagcaagcg

SEQ ID NO: 13363 - DNA, 20 bp, Homo Sapiens
gagcagcagtgagcaagcga

SEQ ID NO: 13364 - DNA, 20 bp, Homo Sapiens
agcagcagtgagcaagcgat

SEQ ID NO: 13365 - DNA, 20 bp, Homo Sapiens
gcagcagtgagcaagcgatg

SEQ ID NO: 13366 - DNA, 20 bp, Homo Sapiens
cagcagtgagcaagcgatgc

SEQ ID NO: 13367 - DNA, 20 bp, Homo Sapiens
agcagtgagcaagcgatgcg

SEQ ID NO: 13368 - DNA, 20 bp, Homo Sapiens
gcagtgagcaagcgatgcga

SEQ ID NO: 13369 - DNA, 20 bp, Homo Sapiens
cagtgagcaagcgatgcgat

SEQ ID NO: 13370 - DNA, 20 bp, Homo Sapiens
agtgagcaagcgatgcgatg

SEQ ID NO: 13371 - DNA, 20 bp, Homo Sapiens
gtgagcaagcgatgcgatgc

SEQ ID NO: 13372 - DNA, 20 bp, Homo Sapiens
tgagcaagcgatgcgatgct

SEQ ID NO: 13373 - DNA, 20 bp, Homo Sapiens
gagcaagcgatgcgatgctc

SEQ ID NO: 13374 - DNA, 20 bp, Homo Sapiens
agcaagcgatgcgatgctct

SEQ ID NO: 13375 - DNA, 20 bp, Homo Sapiens
gcaagcgatgcgatgctctc

SEQ ID NO: 13376 - DNA, 20 bp, Homo Sapiens
caagcgatgcgatgctctct

SEQ ID NO: 13377 - DNA, 20 bp, Homo Sapiens
aagcgatgcgatgctctctc

SEQ ID NO: 13378 - DNA, 20 bp, Homo Sapiens
agcgatgcgatgctctctca

SEQ ID NO: 13379 - DNA, 20 bp, Homo Sapiens
gcgatgcgatgctctctcat

SEQ ID NO: 13380 - DNA, 20 bp, Homo Sapiens
cgatgcgatgctctctcatc

SEQ ID NO: 13381 - DNA, 20 bp, Homo Sapiens
gatgcgatgctctctcatca

SEQ ID NO: 13382 - DNA, 20 bp, Homo Sapiens
atgcgatgctctctcatcac

SEQ ID NO: 13383 - DNA, 20 bp, Homo Sapiens
tgcgatgctctctcatcaca

SEQ ID NO: 13384 - DNA, 20 bp, Homo Sapiens
gcgatgctctctcatcacag

SEQ ID NO: 13385 - DNA, 20 bp, Homo Sapiens
cgatgctctctcatcacaga

SEQ ID NO: 13386 - DNA, 20 bp, Homo Sapiens
gatgctctctcatcacagag

SEQ ID NO: 13387 - DNA, 20 bp, Homo Sapiens
atgctctctcatcacagagc

SEQ ID NO: 13388 - DNA, 20 bp, Homo Sapiens
tgctctctcatcacagagca

SEQ ID NO: 13389 - DNA, 20 bp, Homo Sapiens
gctctctcatcacagagcat

SEQ ID NO: 13390 - DNA, 20 bp, Homo Sapiens
ctctctcatcacagagcatg

SEQ ID NO: 13391 - DNA, 20 bp, Homo Sapiens
tctctcatcacagagcatgt

SEQ ID NO: 13392 - DNA, 20 bp, Homo Sapiens
ctctcatcacagagcatgtg

SEQ ID NO: 13393 - DNA, 20 bp, Homo Sapiens
tctcatcacagagcatgtgg

SEQ ID NO: 13394 - DNA, 20 bp, Homo Sapiens
ctcatcacagagcatgtgga

SEQ ID NO: 13395 - DNA, 20 bp, Homo Sapiens
tcatcacagagcatgtggag

SEQ ID NO: 13396 - DNA, 20 bp, Homo Sapiens
catcacagagcatgtggagg

SEQ ID NO: 13397 - DNA, 20 bp, Homo Sapiens
atcacagagcatgtggaggc

SEQ ID NO: 13398 - DNA, 20 bp, Homo Sapiens
tcacagagcatgtggaggcc

SEQ ID NO: 13399 - DNA, 20 bp, Homo Sapiens
cacagagcatgtggaggcct

SEQ ID NO: 13400 - DNA, 20 bp, Homo Sapiens
acagagcatgtggaggcctt

SEQ ID NO: 13401 - DNA, 20 bp, Homo Sapiens
cagagcatgtggaggccttt

SEQ ID NO: 13402 - DNA, 20 bp, Homo Sapiens
agagcatgtggaggccttta

SEQ ID NO: 13403 - DNA, 20 bp, Homo Sapiens
gagcatgtggaggcctttat

SEQ ID NO: 13404 - DNA, 20 bp, Homo Sapiens
agcatgtggaggcctttatc

SEQ ID NO: 13405 - DNA, 20 bp, Homo Sapiens
gcatgtggaggcctttatca

SEQ ID NO: 13406 - DNA, 20 bp, Homo Sapiens
catgtggaggcctttatcac

SEQ ID NO: 13407 - DNA, 20 bp, Homo Sapiens
atgtggaggcctttatcacc

SEQ ID NO: 13408 - DNA, 20 bp, Homo Sapiens
tgtggaggcctttatcacca

SEQ ID NO: 13409 - DNA, 20 bp, Homo Sapiens
gtggaggcctttatcaccat

SEQ ID NO: 13410 - DNA, 20 bp, Homo Sapiens
tggaggcctttatcaccatc

SEQ ID NO: 13411 - DNA, 20 bp, Homo Sapiens
ggaggcctttatcaccatcc

SEQ ID NO: 13412 - DNA, 20 bp, Homo Sapiens
gaggcctttatcaccatcca

SEQ ID NO: 13413 - DNA, 20 bp, Homo Sapiens
aggcctttatcaccatccag

SEQ ID NO: 13414 - DNA, 20 bp, Homo Sapiens
ggcctttatcaccatccagg

SEQ ID NO: 13415 - DNA, 20 bp, Homo Sapiens
gcctttatcaccatccaggt

SEQ ID NO: 13416 - DNA, 20 bp, Homo Sapiens
cctttatcaccatccaggtg

SEQ ID NO: 13417 - DNA, 20 bp, Homo Sapiens
ctttatcaccatccaggtgg

SEQ ID NO: 13418 - DNA, 20 bp, Homo Sapiens
tttatcaccatccaggtggc

SEQ ID NO: 13419 - DNA, 20 bp, Homo Sapiens
ttatcaccatccaggtggcc

SEQ ID NO: 13420 - DNA, 20 bp, Homo Sapiens
tatcaccatccaggtggccc

SEQ ID NO: 13421 - DNA, 20 bp, Homo Sapiens
atcaccatccaggtggccca

SEQ ID NO: 13422 - DNA, 20 bp, Homo Sapiens
tcaccatccaggtggcccag

SEQ ID NO: 13423 - DNA, 20 bp, Homo Sapiens
caccatccaggtggcccaga

SEQ ID NO: 13424 - DNA, 20 bp, Homo Sapiens
accatccaggtggcccagat

SEQ ID NO: 13425 - DNA, 20 bp, Homo Sapiens
ccatccaggtggcccagatg

SEQ ID NO: 13426 - DNA, 20 bp, Homo Sapiens
catccaggtggcccagatgg

SEQ ID NO: 13427 - DNA, 20 bp, Homo Sapiens
atccaggtggcccagatggt

SEQ ID NO: 13428 - DNA, 20 bp, Homo Sapiens
tccaggtggcccagatggtg

SEQ ID NO: 13429 - DNA, 20 bp, Homo Sapiens
ccaggtggcccagatggtga

SEQ ID NO: 13430 - DNA, 20 bp, Homo Sapiens
caggtggcccagatggtgat

SEQ ID NO: 13431 - DNA, 20 bp, Homo Sapiens
aggtggcccagatggtgatc

SEQ ID NO: 13432 - DNA, 20 bp, Homo Sapiens
ggtggcccagatggtgatcg

SEQ ID NO: 13433 - DNA, 20 bp, Homo Sapiens
gtggcccagatggtgatcgg

SEQ ID NO: 13434 - DNA, 20 bp, Homo Sapiens
tggcccagatggtgatcggc

SEQ ID NO: 13435 - DNA, 20 bp, Homo Sapiens
ggcccagatggtgatcggct

SEQ ID NO: 13436 - DNA, 20 bp, Homo Sapiens
gcccagatggtgatcggctt

SEQ ID NO: 13437 - DNA, 20 bp, Homo Sapiens
cccagatggtgatcggcttt

SEQ ID NO: 13438 - DNA, 20 bp, Homo Sapiens
ccagatggtgatcggctttc

SEQ ID NO: 13439 - DNA, 20 bp, Homo Sapiens
cagatggtgatcggctttct

SEQ ID NO: 13440 - DNA, 20 bp, Homo Sapiens
agatggtgatcggctttctg

SEQ ID NO: 13441 - DNA, 20 bp, Homo Sapiens
gatggtgatcggctttctgg

SEQ ID NO: 13442 - DNA, 20 bp, Homo Sapiens
atggtgatcggctttctggt

SEQ ID NO: 13443 - DNA, 20 bp, Homo Sapiens
tggtgatcggctttctggtc

SEQ ID NO: 13444 - DNA, 20 bp, Homo Sapiens
ggtgatcggctttctggtcc

SEQ ID NO: 13445 - DNA, 20 bp, Homo Sapiens
gtgatcggctttctggtccc

SEQ ID NO: 13446 - DNA, 20 bp, Homo Sapiens
tgatcggctttctggtcccc

SEQ ID NO: 13447 - DNA, 20 bp, Homo Sapiens
gatcggctttctggtccccc

SEQ ID NO: 13448 - DNA, 20 bp, Homo Sapiens
atcggctttctggtccccct

SEQ ID NO: 13449 - DNA, 20 bp, Homo Sapiens
tcggctttctggtccccctg

SEQ ID NO: 13450 - DNA, 20 bp, Homo Sapiens
cggctttctggtccccctgc

SEQ ID NO: 13451 - DNA, 20 bp, Homo Sapiens
ggctttctggtccccctgct

SEQ ID NO: 13452 - DNA, 20 bp, Homo Sapiens
gctttctggtccccctgctg

SEQ ID NO: 13453 - DNA, 20 bp, Homo Sapiens
ctttctggtccccctgctgg

SEQ ID NO: 13454 - DNA, 20 bp, Homo Sapiens
tttctggtccccctgctggc

SEQ ID NO: 13455 - DNA, 20 bp, Homo Sapiens
ttctggtccccctgctggcc

SEQ ID NO: 13456 - DNA, 20 bp, Homo Sapiens
tctggtccccctgctggcca

SEQ ID NO: 13457 - DNA, 20 bp, Homo Sapiens
ctggtccccctgctggccat

SEQ ID NO: 13458 - DNA, 20 bp, Homo Sapiens
tggtccccctgctggccatg

SEQ ID NO: 13459 - DNA, 20 bp, Homo Sapiens
ggtccccctgctggccatga

SEQ ID NO: 13460 - DNA, 20 bp, Homo Sapiens
gtccccctgctggccatgag

SEQ ID NO: 13461 - DNA, 20 bp, Homo Sapiens
tccccctgctggccatgagc

SEQ ID NO: 13462 - DNA, 20 bp, Homo Sapiens
ccccctgctggccatgagct

SEQ ID NO: 13463 - DNA, 20 bp, Homo Sapiens
cccctgctggccatgagctt

SEQ ID NO: 13464 - DNA, 20 bp, Homo Sapiens
ccctgctggccatgagcttc

SEQ ID NO: 13465 - DNA, 20 bp, Homo Sapiens
cctgctggccatgagcttct

SEQ ID NO: 13466 - DNA, 20 bp, Homo Sapiens
ctgctggccatgagcttctg

SEQ ID NO: 13467 - DNA, 20 bp, Homo Sapiens
tgctggccatgagcttctgt

SEQ ID NO: 13468 - DNA, 20 bp, Homo Sapiens
gctggccatgagcttctgtt

SEQ ID NO: 13469 - DNA, 20 bp, Homo Sapiens
ctggccatgagcttctgtta

SEQ ID NO: 13470 - DNA, 20 bp, Homo Sapiens
tggccatgagcttctgttac

SEQ ID NO: 13471 - DNA, 20 bp, Homo Sapiens
ggccatgagcttctgttacc

SEQ ID NO: 13472 - DNA, 20 bp, Homo Sapiens
gccatgagcttctgttacct

SEQ ID NO: 13473 - DNA, 20 bp, Homo Sapiens
ccatgagcttctgttacctt

SEQ ID NO: 13474 - DNA, 20 bp, Homo Sapiens
catgagcttctgttaccttg

SEQ ID NO: 13475 - DNA, 20 bp, Homo Sapiens
atgagcttctgttaccttgt

SEQ ID NO: 13476 - DNA, 20 bp, Homo Sapiens
tgagcttctgttaccttgtc

SEQ ID NO: 13477 - DNA, 20 bp, Homo Sapiens
gagcttctgttaccttgtca

SEQ ID NO: 13478 - DNA, 20 bp, Homo Sapiens
agcttctgttaccttgtcat

SEQ ID NO: 13479 - DNA, 20 bp, Homo Sapiens
gcttctgttaccttgtcatc

SEQ ID NO: 13480 - DNA, 20 bp, Homo Sapiens
cttctgttaccttgtcatca

SEQ ID NO: 13481 - DNA, 20 bp, Homo Sapiens
ttctgttaccttgtcatcat

SEQ ID NO: 13482 - DNA, 20 bp, Homo Sapiens
tctgttaccttgtcatcatc

SEQ ID NO: 13483 - DNA, 20 bp, Homo Sapiens
ctgttaccttgtcatcatcc

SEQ ID NO: 13484 - DNA, 20 bp, Homo Sapiens
tgttaccttgtcatcatccg

SEQ ID NO: 13485 - DNA, 20 bp, Homo Sapiens
gttaccttgtcatcatccgc

SEQ ID NO: 13486 - DNA, 20 bp, Homo Sapiens
ttaccttgtcatcatccgca

SEQ ID NO: 13487 - DNA, 20 bp, Homo Sapiens
taccttgtcatcatccgcac

SEQ ID NO: 13488 - DNA, 20 bp, Homo Sapiens
accttgtcatcatccgcacc

SEQ ID NO: 13489 - DNA, 20 bp, Homo Sapiens
ccttgtcatcatccgcaccc

SEQ ID NO: 13490 - DNA, 20 bp, Homo Sapiens
cttgtcatcatccgcaccct

SEQ ID NO: 13491 - DNA, 20 bp, Homo Sapiens
ttgtcatcatccgcaccctg

SEQ ID NO: 13492 - DNA, 20 bp, Homo Sapiens
tgtcatcatccgcaccctgc

SEQ ID NO: 13493 - DNA, 20 bp, Homo Sapiens
gtcatcatccgcaccctgct

SEQ ID NO: 13494 - DNA, 20 bp, Homo Sapiens
tcatcatccgcaccctgctc

SEQ ID NO: 13495 - DNA, 20 bp, Homo Sapiens
catcatccgcaccctgctcc

SEQ ID NO: 13496 - DNA, 20 bp, Homo Sapiens
atcatccgcaccctgctcca

SEQ ID NO: 13497 - DNA, 20 bp, Homo Sapiens
tcatccgcaccctgctccag

SEQ ID NO: 13498 - DNA, 20 bp, Homo Sapiens
catccgcaccctgctccagg

SEQ ID NO: 13499 - DNA, 20 bp, Homo Sapiens
atccgcaccctgctccaggc

SEQ ID NO: 13500 - DNA, 20 bp, Homo Sapiens
tccgcaccctgctccaggca

SEQ ID NO: 13501 - DNA, 20 bp, Homo Sapiens
ccgcaccctgctccaggcac

SEQ ID NO: 13502 - DNA, 20 bp, Homo Sapiens
cgcaccctgctccaggcacg

SEQ ID NO: 13503 - DNA, 20 bp, Homo Sapiens
gcaccctgctccaggcacgc

SEQ ID NO: 13504 - DNA, 20 bp, Homo Sapiens
caccctgctccaggcacgca

SEQ ID NO: 13505 - DNA, 20 bp, Homo Sapiens
accctgctccaggcacgcaa

SEQ ID NO: 13506 - DNA, 20 bp, Homo Sapiens
ccctgctccaggcacgcaac

SEQ ID NO: 13507 - DNA, 20 bp, Homo Sapiens
cctgctccaggcacgcaact

SEQ ID NO: 13508 - DNA, 20 bp, Homo Sapiens
ctgctccaggcacgcaactt

SEQ ID NO: 13509 - DNA, 20 bp, Homo Sapiens
tgctccaggcacgcaacttt

SEQ ID NO: 13510 - DNA, 20 bp, Homo Sapiens
gctccaggcacgcaactttg

SEQ ID NO: 13511 - DNA, 20 bp, Homo Sapiens
ctccaggcacgcaactttga

SEQ ID NO: 13512 - DNA, 20 bp, Homo Sapiens
tccaggcacgcaactttgag

SEQ ID NO: 13513 - DNA, 20 bp, Homo Sapiens
ccaggcacgcaactttgagc

SEQ ID NO: 13514 - DNA, 20 bp, Homo Sapiens
caggcacgcaactttgagcg

SEQ ID NO: 13515 - DNA, 20 bp, Homo Sapiens
aggcacgcaactttgagcgc

SEQ ID NO: 13516 - DNA, 20 bp, Homo Sapiens
ggcacgcaactttgagcgca

SEQ ID NO: 13517 - DNA, 20 bp, Homo Sapiens
gcacgcaactttgagcgcaa

SEQ ID NO: 13518 - DNA, 20 bp, Homo Sapiens
cacgcaactttgagcgcaac

SEQ ID NO: 13519 - DNA, 20 bp, Homo Sapiens
acgcaactttgagcgcaaca

SEQ ID NO: 13520 - DNA, 20 bp, Homo Sapiens
cgcaactttgagcgcaacaa

SEQ ID NO: 13521 - DNA, 20 bp, Homo Sapiens
gcaactttgagcgcaacaag

SEQ ID NO: 13522 - DNA, 20 bp, Homo Sapiens
caactttgagcgcaacaagg

SEQ ID NO: 13523 - DNA, 20 bp, Homo Sapiens
aactttgagcgcaacaaggc

SEQ ID NO: 13524 - DNA, 20 bp, Homo Sapiens
actttgagcgcaacaaggcc

SEQ ID NO: 13525 - DNA, 20 bp, Homo Sapiens
ctttgagcgcaacaaggcca

SEQ ID NO: 13526 - DNA, 20 bp, Homo Sapiens
tttgagcgcaacaaggccat

SEQ ID NO: 13527 - DNA, 20 bp, Homo Sapiens
ttgagcgcaacaaggccatc

SEQ ID NO: 13528 - DNA, 20 bp, Homo Sapiens
tgagcgcaacaaggccatca

SEQ ID NO: 13529 - DNA, 20 bp, Homo Sapiens
gagcgcaacaaggccatcaa

SEQ ID NO: 13530 - DNA, 20 bp, Homo Sapiens
agcgcaacaaggccatcaag

SEQ ID NO: 13531 - DNA, 20 bp, Homo Sapiens
gcgcaacaaggccatcaagg

SEQ ID NO: 13532 - DNA, 20 bp, Homo Sapiens
cgcaacaaggccatcaaggt

SEQ ID NO: 13533 - DNA, 20 bp, Homo Sapiens
gcaacaaggccatcaaggtg

SEQ ID NO: 13534 - DNA, 20 bp, Homo Sapiens
caacaaggccatcaaggtga

SEQ ID NO: 13535 - DNA, 20 bp, Homo Sapiens
aacaaggccatcaaggtgat

SEQ ID NO: 13536 - DNA, 20 bp, Homo Sapiens
acaaggccatcaaggtgatc

SEQ ID NO: 13537 - DNA, 20 bp, Homo Sapiens
caaggccatcaaggtgatca

SEQ ID NO: 13538 - DNA, 20 bp, Homo Sapiens
aaggccatcaaggtgatcat

SEQ ID NO: 13539 - DNA, 20 bp, Homo Sapiens
aggccatcaaggtgatcatc

SEQ ID NO: 13540 - DNA, 20 bp, Homo Sapiens
ggccatcaaggtgatcatcg

SEQ ID NO: 13541 - DNA, 20 bp, Homo Sapiens
gccatcaaggtgatcatcgc

SEQ ID NO: 13542 - DNA, 20 bp, Homo Sapiens
ccatcaaggtgatcatcgct

SEQ ID NO: 13543 - DNA, 20 bp, Homo Sapiens
catcaaggtgatcatcgctg

SEQ ID NO: 13544 - DNA, 20 bp, Homo Sapiens
atcaaggtgatcatcgctgt

SEQ ID NO: 13545 - DNA, 20 bp, Homo Sapiens
tcaaggtgatcatcgctgtg

SEQ ID NO: 13546 - DNA, 20 bp, Homo Sapiens
caaggtgatcatcgctgtgg

SEQ ID NO: 13547 - DNA, 20 bp, Homo Sapiens
aaggtgatcatcgctgtggt

SEQ ID NO: 13548 - DNA, 20 bp, Homo Sapiens
aggtgatcatcgctgtggtc

SEQ ID NO: 13549 - DNA, 20 bp, Homo Sapiens
ggtgatcatcgctgtggtcg

SEQ ID NO: 13550 - DNA, 20 bp, Homo Sapiens
gtgatcatcgctgtggtcgt

SEQ ID NO: 13551 - DNA, 20 bp, Homo Sapiens
tgatcatcgctgtggtcgtg

SEQ ID NO: 13552 - DNA, 20 bp, Homo Sapiens
gatcatcgctgtggtcgtgg

SEQ ID NO: 13553 - DNA, 20 bp, Homo Sapiens
atcatcgctgtggtcgtggt

SEQ ID NO: 13554 - DNA, 20 bp, Homo Sapiens
tcatcgctgtggtcgtggtc

SEQ ID NO: 13555 - DNA, 20 bp, Homo Sapiens
catcgctgtggtcgtggtct

SEQ ID NO: 13556 - DNA, 20 bp, Homo Sapiens
atcgctgtggtcgtggtctt

SEQ ID NO: 13557 - DNA, 20 bp, Homo Sapiens
tcgctgtggtcgtggtcttc

SEQ ID NO: 13558 - DNA, 20 bp, Homo Sapiens
cgctgtggtcgtggtcttca

SEQ ID NO: 13559 - DNA, 20 bp, Homo Sapiens
gctgtggtcgtggtcttcat

SEQ ID NO: 13560 - DNA, 20 bp, Homo Sapiens
ctgtggtcgtggtcttcata

SEQ ID NO: 13561 - DNA, 20 bp, Homo Sapiens
tgtggtcgtggtcttcatag

SEQ ID NO: 13562 - DNA, 20 bp, Homo Sapiens
gtggtcgtggtcttcatagt

SEQ ID NO: 13563 - DNA, 20 bp, Homo Sapiens
tggtcgtggtcttcatagtc

SEQ ID NO: 13564 - DNA, 20 bp, Homo Sapiens
ggtcgtggtcttcatagtct

SEQ ID NO: 13565 - DNA, 20 bp, Homo Sapiens
gtcgtggtcttcatagtctt

SEQ ID NO: 13566 - DNA, 20 bp, Homo Sapiens
tcgtggtcttcatagtcttc

SEQ ID NO: 13567 - DNA, 20 bp, Homo Sapiens
cgtggtcttcatagtcttcc

SEQ ID NO: 13568 - DNA, 20 bp, Homo Sapiens
gtggtcttcatagtcttcca

SEQ ID NO: 13569 - DNA, 20 bp, Homo Sapiens
tggtcttcatagtcttccag

SEQ ID NO: 13570 - DNA, 20 bp, Homo Sapiens
ggtcttcatagtcttccagc

SEQ ID NO: 13571 - DNA, 20 bp, Homo Sapiens
gtcttcatagtcttccagct

SEQ ID NO: 13572 - DNA, 20 bp, Homo Sapiens
tcttcatagtcttccagctg

SEQ ID NO: 13573 - DNA, 20 bp, Homo Sapiens
cttcatagtcttccagctgc

SEQ ID NO: 13574 - DNA, 20 bp, Homo Sapiens
ttcatagtcttccagctgcc

SEQ ID NO: 13575 - DNA, 20 bp, Homo Sapiens
tcatagtcttccagctgccc

SEQ ID NO: 13576 - DNA, 20 bp, Homo Sapiens
catagtcttccagctgccct

SEQ ID NO: 13577 - DNA, 20 bp, Homo Sapiens
atagtcttccagctgcccta

SEQ ID NO: 13578 - DNA, 20 bp, Homo Sapiens
tagtcttccagctgccctac

SEQ ID NO: 13579 - DNA, 20 bp, Homo Sapiens
agtcttccagctgccctaca

SEQ ID NO: 13580 - DNA, 20 bp, Homo Sapiens
gtcttccagctgccctacaa

SEQ ID NO: 13581 - DNA, 20 bp, Homo Sapiens
tcttccagctgccctacaat

SEQ ID NO: 13582 - DNA, 20 bp, Homo Sapiens
cttccagctgccctacaatg

SEQ ID NO: 13583 - DNA, 20 bp, Homo Sapiens
ttccagctgccctacaatgg

SEQ ID NO: 13584 - DNA, 20 bp, Homo Sapiens
tccagctgccctacaatggg

SEQ ID NO: 13585 - DNA, 20 bp, Homo Sapiens
ccagctgccctacaatgggg

SEQ ID NO: 13586 - DNA, 20 bp, Homo Sapiens
cagctgccctacaatggggt

SEQ ID NO: 13587 - DNA, 20 bp, Homo Sapiens
agctgccctacaatggggtg

SEQ ID NO: 13588 - DNA, 20 bp, Homo Sapiens
gctgccctacaatggggtgg

SEQ ID NO: 13589 - DNA, 20 bp, Homo Sapiens
ctgccctacaatggggtggt

SEQ ID NO: 13590 - DNA, 20 bp, Homo Sapiens
tgccctacaatggggtggtc

SEQ ID NO: 13591 - DNA, 20 bp, Homo Sapiens
gccctacaatggggtggtcc

SEQ ID NO: 13592 - DNA, 20 bp, Homo Sapiens
ccctacaatggggtggtcct

SEQ ID NO: 13593 - DNA, 20 bp, Homo Sapiens
cctacaatggggtggtcctg

SEQ ID NO: 13594 - DNA, 20 bp, Homo Sapiens
ctacaatggggtggtcctgg

SEQ ID NO: 13595 - DNA, 20 bp, Homo Sapiens
tacaatggggtggtcctggc

SEQ ID NO: 13596 - DNA, 20 bp, Homo Sapiens
acaatggggtggtcctggcc

SEQ ID NO: 13597 - DNA, 20 bp, Homo Sapiens
caatggggtggtcctggccc

SEQ ID NO: 13598 - DNA, 20 bp, Homo Sapiens
aatggggtggtcctggccca

SEQ ID NO: 13599 - DNA, 20 bp, Homo Sapiens
atggggtggtcctggcccag

SEQ ID NO: 13600 - DNA, 20 bp, Homo Sapiens
tggggtggtcctggcccaga

SEQ ID NO: 13601 - DNA, 20 bp, Homo Sapiens
ggggtggtcctggcccagac

SEQ ID NO: 13602 - DNA, 20 bp, Homo Sapiens
gggtggtcctggcccagacg

SEQ ID NO: 13603 - DNA, 20 bp, Homo Sapiens
ggtggtcctggcccagacgg

SEQ ID NO: 13604 - DNA, 20 bp, Homo Sapiens
gtggtcctggcccagacggt

SEQ ID NO: 13605 - DNA, 20 bp, Homo Sapiens
tggtcctggcccagacggtg

SEQ ID NO: 13606 - DNA, 20 bp, Homo Sapiens
ggtcctggcccagacggtgg

SEQ ID NO: 13607 - DNA, 20 bp, Homo Sapiens
gtcctggcccagacggtggc

SEQ ID NO: 13608 - DNA, 20 bp, Homo Sapiens
tcctggcccagacggtggcc

SEQ ID NO: 13609 - DNA, 20 bp, Homo Sapiens
cctggcccagacggtggcca

SEQ ID NO: 13610 - DNA, 20 bp, Homo Sapiens
ctggcccagacggtggccaa

SEQ ID NO: 13611 - DNA, 20 bp, Homo Sapiens
tggcccagacggtggccaac

SEQ ID NO: 13612 - DNA, 20 bp, Homo Sapiens
ggcccagacggtggccaact

SEQ ID NO: 13613 - DNA, 20 bp, Homo Sapiens
gcccagacggtggccaactt

SEQ ID NO: 13614 - DNA, 20 bp, Homo Sapiens
cccagacggtggccaacttc

SEQ ID NO: 13615 - DNA, 20 bp, Homo Sapiens
ccagacggtggccaacttca

SEQ ID NO: 13616 - DNA, 20 bp, Homo Sapiens
cagacggtggccaacttcaa

SEQ ID NO: 13617 - DNA, 20 bp, Homo Sapiens
agacggtggccaacttcaac

SEQ ID NO: 13618 - DNA, 20 bp, Homo Sapiens
gacggtggccaacttcaaca

SEQ ID NO: 13619 - DNA, 20 bp, Homo Sapiens
acggtggccaacttcaacat

SEQ ID NO: 13620 - DNA, 20 bp, Homo Sapiens
cggtggccaacttcaacatc

SEQ ID NO: 13621 - DNA, 20 bp, Homo Sapiens
ggtggccaacttcaacatca

SEQ ID NO: 13622 - DNA, 20 bp, Homo Sapiens
gtggccaacttcaacatcac

SEQ ID NO: 13623 - DNA, 20 bp, Homo Sapiens
tggccaacttcaacatcacc

SEQ ID NO: 13624 - DNA, 20 bp, Homo Sapiens
ggccaacttcaacatcacca

SEQ ID NO: 13625 - DNA, 20 bp, Homo Sapiens
gccaacttcaacatcaccag

SEQ ID NO: 13626 - DNA, 20 bp, Homo Sapiens
ccaacttcaacatcaccagt

SEQ ID NO: 13627 - DNA, 20 bp, Homo Sapiens
caacttcaacatcaccagta

SEQ ID NO: 13628 - DNA, 20 bp, Homo Sapiens
aacttcaacatcaccagtag

SEQ ID NO: 13629 - DNA, 20 bp, Homo Sapiens
acttcaacatcaccagtagc

SEQ ID NO: 13630 - DNA, 20 bp, Homo Sapiens
cttcaacatcaccagtagca

SEQ ID NO: 13631 - DNA, 20 bp, Homo Sapiens
ttcaacatcaccagtagcac

SEQ ID NO: 13632 - DNA, 20 bp, Homo Sapiens
tcaacatcaccagtagcacc

SEQ ID NO: 13633 - DNA, 20 bp, Homo Sapiens
caacatcaccagtagcacct

SEQ ID NO: 13634 - DNA, 20 bp, Homo Sapiens
aacatcaccagtagcacctg

SEQ ID NO: 13635 - DNA, 20 bp, Homo Sapiens
acatcaccagtagcacctgt

SEQ ID NO: 13636 - DNA, 20 bp, Homo Sapiens
catcaccagtagcacctgtg

SEQ ID NO: 13637 - DNA, 20 bp, Homo Sapiens
atcaccagtagcacctgtga

SEQ ID NO: 13638 - DNA, 20 bp, Homo Sapiens
tcaccagtagcacctgtgag

SEQ ID NO: 13639 - DNA, 20 bp, Homo Sapiens
caccagtagcacctgtgagc

SEQ ID NO: 13640 - DNA, 20 bp, Homo Sapiens
accagtagcacctgtgagct

SEQ ID NO: 13641 - DNA, 20 bp, Homo Sapiens
ccagtagcacctgtgagctc

SEQ ID NO: 13642 - DNA, 20 bp, Homo Sapiens
cagtagcacctgtgagctca

SEQ ID NO: 13643 - DNA, 20 bp, Homo Sapiens
agtagcacctgtgagctcag

SEQ ID NO: 13644 - DNA, 20 bp, Homo Sapiens
gtagcacctgtgagctcagt

SEQ ID NO: 13645 - DNA, 20 bp, Homo Sapiens
tagcacctgtgagctcagta

SEQ ID NO: 13646 - DNA, 20 bp, Homo Sapiens
agcacctgtgagctcagtaa

SEQ ID NO: 13647 - DNA, 20 bp, Homo Sapiens
gcacctgtgagctcagtaag

SEQ ID NO: 13648 - DNA, 20 bp, Homo Sapiens
cacctgtgagctcagtaagc

SEQ ID NO: 13649 - DNA, 20 bp, Homo Sapiens
acctgtgagctcagtaagca

SEQ ID NO: 13650 - DNA, 20 bp, Homo Sapiens
cctgtgagctcagtaagcaa

SEQ ID NO: 13651 - DNA, 20 bp, Homo Sapiens
ctgtgagctcagtaagcaac

SEQ ID NO: 13652 - DNA, 20 bp, Homo Sapiens
tgtgagctcagtaagcaact

SEQ ID NO: 13653 - DNA, 20 bp, Homo Sapiens
gtgagctcagtaagcaactc

SEQ ID NO: 13654 - DNA, 20 bp, Homo Sapiens
tgagctcagtaagcaactca

SEQ ID NO: 13655 - DNA, 20 bp, Homo Sapiens
gagctcagtaagcaactcaa

SEQ ID NO: 13656 - DNA, 20 bp, Homo Sapiens
agctcagtaagcaactcaac

SEQ ID NO: 13657 - DNA, 20 bp, Homo Sapiens
gctcagtaagcaactcaaca

SEQ ID NO: 13658 - DNA, 20 bp, Homo Sapiens
ctcagtaagcaactcaacat

SEQ ID NO: 13659 - DNA, 20 bp, Homo Sapiens
tcagtaagcaactcaacatc

SEQ ID NO: 13660 - DNA, 20 bp, Homo Sapiens
cagtaagcaactcaacatcg

SEQ ID NO: 13661 - DNA, 20 bp, Homo Sapiens
agtaagcaactcaacatcgc

SEQ ID NO: 13662 - DNA, 20 bp, Homo Sapiens
gtaagcaactcaacatcgcc

SEQ ID NO: 13663 - DNA, 20 bp, Homo Sapiens
taagcaactcaacatcgcct

SEQ ID NO: 13664 - DNA, 20 bp, Homo Sapiens
aagcaactcaacatcgccta

SEQ ID NO: 13665 - DNA, 20 bp, Homo Sapiens
agcaactcaacatcgcctac

SEQ ID NO: 13666 - DNA, 20 bp, Homo Sapiens
gcaactcaacatcgcctacg

SEQ ID NO: 13667 - DNA, 20 bp, Homo Sapiens
caactcaacatcgcctacga

SEQ ID NO: 13668 - DNA, 20 bp, Homo Sapiens
aactcaacatcgcctacgac

SEQ ID NO: 13669 - DNA, 20 bp, Homo Sapiens
actcaacatcgcctacgacg

SEQ ID NO: 13670 - DNA, 20 bp, Homo Sapiens
ctcaacatcgcctacgacgt

SEQ ID NO: 13671 - DNA, 20 bp, Homo Sapiens
tcaacatcgcctacgacgtc

SEQ ID NO: 13672 - DNA, 20 bp, Homo Sapiens
caacatcgcctacgacgtca

SEQ ID NO: 13673 - DNA, 20 bp, Homo Sapiens
aacatcgcctacgacgtcac

SEQ ID NO: 13674 - DNA, 20 bp, Homo Sapiens
acatcgcctacgacgtcacc

SEQ ID NO: 13675 - DNA, 20 bp, Homo Sapiens
catcgcctacgacgtcacct

SEQ ID NO: 13676 - DNA, 20 bp, Homo Sapiens
atcgcctacgacgtcaccta

SEQ ID NO: 13677 - DNA, 20 bp, Homo Sapiens
tcgcctacgacgtcacctac

SEQ ID NO: 13678 - DNA, 20 bp, Homo Sapiens
cgcctacgacgtcacctaca

SEQ ID NO: 13679 - DNA, 20 bp, Homo Sapiens
gcctacgacgtcacctacag

SEQ ID NO: 13680 - DNA, 20 bp, Homo Sapiens
cctacgacgtcacctacagc

SEQ ID NO: 13681 - DNA, 20 bp, Homo Sapiens
ctacgacgtcacctacagcc

SEQ ID NO: 13682 - DNA, 20 bp, Homo Sapiens
tacgacgtcacctacagcct

SEQ ID NO: 13683 - DNA, 20 bp, Homo Sapiens
acgacgtcacctacagcctg

SEQ ID NO: 13684 - DNA, 20 bp, Homo Sapiens
cgacgtcacctacagcctgg

SEQ ID NO: 13685 - DNA, 20 bp, Homo Sapiens
gacgtcacctacagcctggc

SEQ ID NO: 13686 - DNA, 20 bp, Homo Sapiens
acgtcacctacagcctggcc

SEQ ID NO: 13687 - DNA, 20 bp, Homo Sapiens
cgtcacctacagcctggcct

SEQ ID NO: 13688 - DNA, 20 bp, Homo Sapiens
gtcacctacagcctggcctg

SEQ ID NO: 13689 - DNA, 20 bp, Homo Sapiens
tcacctacagcctggcctgc

SEQ ID NO: 13690 - DNA, 20 bp, Homo Sapiens
cacctacagcctggcctgcg

SEQ ID NO: 13691 - DNA, 20 bp, Homo Sapiens
acctacagcctggcctgcgt

SEQ ID NO: 13692 - DNA, 20 bp, Homo Sapiens
cctacagcctggcctgcgtc

SEQ ID NO: 13693 - DNA, 20 bp, Homo Sapiens
ctacagcctggcctgcgtcc

SEQ ID NO: 13694 - DNA, 20 bp, Homo Sapiens
tacagcctggcctgcgtccg

SEQ ID NO: 13695 - DNA, 20 bp, Homo Sapiens
acagcctggcctgcgtccgc

SEQ ID NO: 13696 - DNA, 20 bp, Homo Sapiens
cagcctggcctgcgtccgct

SEQ ID NO: 13697 - DNA, 20 bp, Homo Sapiens
agcctggcctgcgtccgctg

SEQ ID NO: 13698 - DNA, 20 bp, Homo Sapiens
gcctggcctgcgtccgctgc

SEQ ID NO: 13699 - DNA, 20 bp, Homo Sapiens
cctggcctgcgtccgctgct

SEQ ID NO: 13700 - DNA, 20 bp, Homo Sapiens
ctggcctgcgtccgctgctg

SEQ ID NO: 13701 - DNA, 20 bp, Homo Sapiens
tggcctgcgtccgctgctgc

SEQ ID NO: 13702 - DNA, 20 bp, Homo Sapiens
ggcctgcgtccgctgctgcg

SEQ ID NO: 13703 - DNA, 20 bp, Homo Sapiens
gcctgcgtccgctgctgcgt

SEQ ID NO: 13704 - DNA, 20 bp, Homo Sapiens
cctgcgtccgctgctgcgtc

SEQ ID NO: 13705 - DNA, 20 bp, Homo Sapiens
ctgcgtccgctgctgcgtca

SEQ ID NO: 13706 - DNA, 20 bp, Homo Sapiens
tgcgtccgctgctgcgtcaa

SEQ ID NO: 13707 - DNA, 20 bp, Homo Sapiens
gcgtccgctgctgcgtcaac

SEQ ID NO: 13708 - DNA, 20 bp, Homo Sapiens
cgtccgctgctgcgtcaacc

SEQ ID NO: 13709 - DNA, 20 bp, Homo Sapiens
gtccgctgctgcgtcaaccc

SEQ ID NO: 13710 - DNA, 20 bp, Homo Sapiens
tccgctgctgcgtcaaccct

SEQ ID NO: 13711 - DNA, 20 bp, Homo Sapiens
ccgctgctgcgtcaaccctt

SEQ ID NO: 13712 - DNA, 20 bp, Homo Sapiens
cgctgctgcgtcaacccttt

SEQ ID NO: 13713 - DNA, 20 bp, Homo Sapiens
gctgctgcgtcaaccctttc

SEQ ID NO: 13714 - DNA, 20 bp, Homo Sapiens
ctgctgcgtcaaccctttct

SEQ ID NO: 13715 - DNA, 20 bp, Homo Sapiens
tgctgcgtcaaccctttctt

SEQ ID NO: 13716 - DNA, 20 bp, Homo Sapiens
gctgcgtcaaccctttcttg

SEQ ID NO: 13717 - DNA, 20 bp, Homo Sapiens
ctgcgtcaaccctttcttgt

SEQ ID NO: 13718 - DNA, 20 bp, Homo Sapiens
tgcgtcaaccctttcttgta

SEQ ID NO: 13719 - DNA, 20 bp, Homo Sapiens
gcgtcaaccctttcttgtac

SEQ ID NO: 13720 - DNA, 20 bp, Homo Sapiens
cgtcaaccctttcttgtacg

SEQ ID NO: 13721 - DNA, 20 bp, Homo Sapiens
gtcaaccctttcttgtacgc

SEQ ID NO: 13722 - DNA, 20 bp, Homo Sapiens
tcaaccctttcttgtacgcc

SEQ ID NO: 13723 - DNA, 20 bp, Homo Sapiens
caaccctttcttgtacgcct

SEQ ID NO: 13724 - DNA, 20 bp, Homo Sapiens
aaccctttcttgtacgcctt

SEQ ID NO: 13725 - DNA, 20 bp, Homo Sapiens
accctttcttgtacgccttc

SEQ ID NO: 13726 - DNA, 20 bp, Homo Sapiens
ccctttcttgtacgccttca

SEQ ID NO: 13727 - DNA, 20 bp, Homo Sapiens
cctttcttgtacgccttcat

SEQ ID NO: 13728 - DNA, 20 bp, Homo Sapiens
ctttcttgtacgccttcatc

SEQ ID NO: 13729 - DNA, 20 bp, Homo Sapiens
tttcttgtacgccttcatcg

SEQ ID NO: 13730 - DNA, 20 bp, Homo Sapiens
ttcttgtacgccttcatcgg

SEQ ID NO: 13731 - DNA, 20 bp, Homo Sapiens
tcttgtacgccttcatcggc

SEQ ID NO: 13732 - DNA, 20 bp, Homo Sapiens
cttgtacgccttcatcggcg

SEQ ID NO: 13733 - DNA, 20 bp, Homo Sapiens
ttgtacgccttcatcggcgt

SEQ ID NO: 13734 - DNA, 20 bp, Homo Sapiens
tgtacgccttcatcggcgtc

SEQ ID NO: 13735 - DNA, 20 bp, Homo Sapiens
gtacgccttcatcggcgtca

SEQ ID NO: 13736 - DNA, 20 bp, Homo Sapiens
tacgccttcatcggcgtcaa

SEQ ID NO: 13737 - DNA, 20 bp, Homo Sapiens
acgccttcatcggcgtcaag

SEQ ID NO: 13738 - DNA, 20 bp, Homo Sapiens
cgccttcatcggcgtcaagt

SEQ ID NO: 13739 - DNA, 20 bp, Homo Sapiens
gccttcatcggcgtcaagtt

SEQ ID NO: 13740 - DNA, 20 bp, Homo Sapiens
ccttcatcggcgtcaagttc

SEQ ID NO: 13741 - DNA, 20 bp, Homo Sapiens
cttcatcggcgtcaagttcc

SEQ ID NO: 13742 - DNA, 20 bp, Homo Sapiens
ttcatcggcgtcaagttccg

SEQ ID NO: 13743 - DNA, 20 bp, Homo Sapiens
tcatcggcgtcaagttccgc

SEQ ID NO: 13744 - DNA, 20 bp, Homo Sapiens
catcggcgtcaagttccgca

SEQ ID NO: 13745 - DNA, 20 bp, Homo Sapiens
atcggcgtcaagttccgcaa

SEQ ID NO: 13746 - DNA, 20 bp, Homo Sapiens
tcggcgtcaagttccgcaac

SEQ ID NO: 13747 - DNA, 20 bp, Homo Sapiens
cggcgtcaagttccgcaacg

SEQ ID NO: 13748 - DNA, 20 bp, Homo Sapiens
ggcgtcaagttccgcaacga

SEQ ID NO: 13749 - DNA, 20 bp, Homo Sapiens
gcgtcaagttccgcaacgat

SEQ ID NO: 13750 - DNA, 20 bp, Homo Sapiens
cgtcaagttccgcaacgatc

SEQ ID NO: 13751 - DNA, 20 bp, Homo Sapiens
gtcaagttccgcaacgatct

SEQ ID NO: 13752 - DNA, 20 bp, Homo Sapiens
tcaagttccgcaacgatctc

SEQ ID NO: 13753 - DNA, 20 bp, Homo Sapiens
caagttccgcaacgatctct

SEQ ID NO: 13754 - DNA, 20 bp, Homo Sapiens
aagttccgcaacgatctctt

SEQ ID NO: 13755 - DNA, 20 bp, Homo Sapiens
agttccgcaacgatctcttc

SEQ ID NO: 13756 - DNA, 20 bp, Homo Sapiens
gttccgcaacgatctcttca

SEQ ID NO: 13757 - DNA, 20 bp, Homo Sapiens
ttccgcaacgatctcttcaa

SEQ ID NO: 13758 - DNA, 20 bp, Homo Sapiens
tccgcaacgatctcttcaag

SEQ ID NO: 13759 - DNA, 20 bp, Homo Sapiens
ccgcaacgatctcttcaagc

SEQ ID NO: 13760 - DNA, 20 bp, Homo Sapiens
cgcaacgatctcttcaagct

SEQ ID NO: 13761 - DNA, 20 bp, Homo Sapiens
gcaacgatctcttcaagctc

SEQ ID NO: 13762 - DNA, 20 bp, Homo Sapiens
caacgatctcttcaagctct

SEQ ID NO: 13763 - DNA, 20 bp, Homo Sapiens
aacgatctcttcaagctctt

SEQ ID NO: 13764 - DNA, 20 bp, Homo Sapiens
acgatctcttcaagctcttc

SEQ ID NO: 13765 - DNA, 20 bp, Homo Sapiens
cgatctcttcaagctcttca

SEQ ID NO: 13766 - DNA, 20 bp, Homo Sapiens
gatctcttcaagctcttcaa

SEQ ID NO: 13767 - DNA, 20 bp, Homo Sapiens
atctcttcaagctcttcaag

SEQ ID NO: 13768 - DNA, 20 bp, Homo Sapiens
tctcttcaagctcttcaagg

SEQ ID NO: 13769 - DNA, 20 bp, Homo Sapiens
ctcttcaagctcttcaagga

SEQ ID NO: 13770 - DNA, 20 bp, Homo Sapiens
tcttcaagctcttcaaggac

SEQ ID NO: 13771 - DNA, 20 bp, Homo Sapiens
cttcaagctcttcaaggacc

SEQ ID NO: 13772 - DNA, 20 bp, Homo Sapiens
ttcaagctcttcaaggacct

SEQ ID NO: 13773 - DNA, 20 bp, Homo Sapiens
tcaagctcttcaaggacctg

SEQ ID NO: 13774 - DNA, 20 bp, Homo Sapiens
caagctcttcaaggacctgg

SEQ ID NO: 13775 - DNA, 20 bp, Homo Sapiens
aagctcttcaaggacctggg

SEQ ID NO: 13776 - DNA, 20 bp, Homo Sapiens
agctcttcaaggacctgggc

SEQ ID NO: 13777 - DNA, 20 bp, Homo Sapiens
gctcttcaaggacctgggct

SEQ ID NO: 13778 - DNA, 20 bp, Homo Sapiens
ctcttcaaggacctgggctg

SEQ ID NO: 13779 - DNA, 20 bp, Homo Sapiens
tcttcaaggacctgggctgc

SEQ ID NO: 13780 - DNA, 20 bp, Homo Sapiens
cttcaaggacctgggctgcc

SEQ ID NO: 13781 - DNA, 20 bp, Homo Sapiens
ttcaaggacctgggctgcct

SEQ ID NO: 13782 - DNA, 20 bp, Homo Sapiens
tcaaggacctgggctgcctc

SEQ ID NO: 13783 - DNA, 20 bp, Homo Sapiens
caaggacctgggctgcctca

SEQ ID NO: 13784 - DNA, 20 bp, Homo Sapiens
aaggacctgggctgcctcag

SEQ ID NO: 13785 - DNA, 20 bp, Homo Sapiens
aggacctgggctgcctcagc

SEQ ID NO: 13786 - DNA, 20 bp, Homo Sapiens
ggacctgggctgcctcagcc

SEQ ID NO: 13787 - DNA, 20 bp, Homo Sapiens
gacctgggctgcctcagcca

SEQ ID NO: 13788 - DNA, 20 bp, Homo Sapiens
acctgggctgcctcagccag

SEQ ID NO: 13789 - DNA, 20 bp, Homo Sapiens
cctgggctgcctcagccagg

SEQ ID NO: 13790 - DNA, 20 bp, Homo Sapiens
ctgggctgcctcagccagga

SEQ ID NO: 13791 - DNA, 20 bp, Homo Sapiens
tgggctgcctcagccaggag

SEQ ID NO: 13792 - DNA, 20 bp, Homo Sapiens
gggctgcctcagccaggagc

SEQ ID NO: 13793 - DNA, 20 bp, Homo Sapiens
ggctgcctcagccaggagca

SEQ ID NO: 13794 - DNA, 20 bp, Homo Sapiens
gctgcctcagccaggagcag

SEQ ID NO: 13795 - DNA, 20 bp, Homo Sapiens
ctgcctcagccaggagcagc

SEQ ID NO: 13796 - DNA, 20 bp, Homo Sapiens
tgcctcagccaggagcagct

SEQ ID NO: 13797 - DNA, 20 bp, Homo Sapiens
gcctcagccaggagcagctc

SEQ ID NO: 13798 - DNA, 20 bp, Homo Sapiens
cctcagccaggagcagctcc

SEQ ID NO: 13799 - DNA, 20 bp, Homo Sapiens
ctcagccaggagcagctccg

SEQ ID NO: 13800 - DNA, 20 bp, Homo Sapiens
tcagccaggagcagctccgg

SEQ ID NO: 13801 - DNA, 20 bp, Homo Sapiens
cagccaggagcagctccggc

SEQ ID NO: 13802 - DNA, 20 bp, Homo Sapiens
agccaggagcagctccggca

SEQ ID NO: 13803 - DNA, 20 bp, Homo Sapiens
gccaggagcagctccggcag

SEQ ID NO: 13804 - DNA, 20 bp, Homo Sapiens
ccaggagcagctccggcagt

SEQ ID NO: 13805 - DNA, 20 bp, Homo Sapiens
caggagcagctccggcagtg

SEQ ID NO: 13806 - DNA, 20 bp, Homo Sapiens
aggagcagctccggcagtgg

SEQ ID NO: 13807 - DNA, 20 bp, Homo Sapiens
ggagcagctccggcagtggt

SEQ ID NO: 13808 - DNA, 20 bp, Homo Sapiens
gagcagctccggcagtggtc

SEQ ID NO: 13809 - DNA, 20 bp, Homo Sapiens
agcagctccggcagtggtct

SEQ ID NO: 13810 - DNA, 20 bp, Homo Sapiens
gcagctccggcagtggtctt

SEQ ID NO: 13811 - DNA, 20 bp, Homo Sapiens
cagctccggcagtggtcttc

SEQ ID NO: 13812 - DNA, 20 bp, Homo Sapiens
agctccggcagtggtcttcc

SEQ ID NO: 13813 - DNA, 20 bp, Homo Sapiens
gctccggcagtggtcttcct

SEQ ID NO: 13814 - DNA, 20 bp, Homo Sapiens
ctccggcagtggtcttcctg

SEQ ID NO: 13815 - DNA, 20 bp, Homo Sapiens
tccggcagtggtcttcctgt

SEQ ID NO: 13816 - DNA, 20 bp, Homo Sapiens
ccggcagtggtcttcctgtc

SEQ ID NO: 13817 - DNA, 20 bp, Homo Sapiens
cggcagtggtcttcctgtcg

SEQ ID NO: 13818 - DNA, 20 bp, Homo Sapiens
ggcagtggtcttcctgtcgg

SEQ ID NO: 13819 - DNA, 20 bp, Homo Sapiens
gcagtggtcttcctgtcggc

SEQ ID NO: 13820 - DNA, 20 bp, Homo Sapiens
cagtggtcttcctgtcggca

SEQ ID NO: 13821 - DNA, 20 bp, Homo Sapiens
agtggtcttcctgtcggcac

SEQ ID NO: 13822 - DNA, 20 bp, Homo Sapiens
gtggtcttcctgtcggcaca

SEQ ID NO: 13823 - DNA, 20 bp, Homo Sapiens
tggtcttcctgtcggcacat

SEQ ID NO: 13824 - DNA, 20 bp, Homo Sapiens
ggtcttcctgtcggcacatc

SEQ ID NO: 13825 - DNA, 20 bp, Homo Sapiens
gtcttcctgtcggcacatcc

SEQ ID NO: 13826 - DNA, 20 bp, Homo Sapiens
tcttcctgtcggcacatccg

SEQ ID NO: 13827 - DNA, 20 bp, Homo Sapiens
cttcctgtcggcacatccgg

SEQ ID NO: 13828 - DNA, 20 bp, Homo Sapiens
ttcctgtcggcacatccggc

SEQ ID NO: 13829 - DNA, 20 bp, Homo Sapiens
tcctgtcggcacatccggcg

SEQ ID NO: 13830 - DNA, 20 bp, Homo Sapiens
cctgtcggcacatccggcgc

SEQ ID NO: 13831 - DNA, 20 bp, Homo Sapiens
ctgtcggcacatccggcgct

SEQ ID NO: 13832 - DNA, 20 bp, Homo Sapiens
tgtcggcacatccggcgctc

SEQ ID NO: 13833 - DNA, 20 bp, Homo Sapiens
gtcggcacatccggcgctcc

SEQ ID NO: 13834 - DNA, 20 bp, Homo Sapiens
tcggcacatccggcgctcct

SEQ ID NO: 13835 - DNA, 20 bp, Homo Sapiens
cggcacatccggcgctcctc

SEQ ID NO: 13836 - DNA, 20 bp, Homo Sapiens
ggcacatccggcgctcctcc

SEQ ID NO: 13837 - DNA, 20 bp, Homo Sapiens
gcacatccggcgctcctcca

SEQ ID NO: 13838 - DNA, 20 bp, Homo Sapiens
cacatccggcgctcctccat

SEQ ID NO: 13839 - DNA, 20 bp, Homo Sapiens
acatccggcgctcctccatg

SEQ ID NO: 13840 - DNA, 20 bp, Homo Sapiens
catccggcgctcctccatga

SEQ ID NO: 13841 - DNA, 20 bp, Homo Sapiens
atccggcgctcctccatgag

SEQ ID NO: 13842 - DNA, 20 bp, Homo Sapiens
tccggcgctcctccatgagt

SEQ ID NO: 13843 - DNA, 20 bp, Homo Sapiens
ccggcgctcctccatgagtg

SEQ ID NO: 13844 - DNA, 20 bp, Homo Sapiens
cggcgctcctccatgagtgt

SEQ ID NO: 13845 - DNA, 20 bp, Homo Sapiens
ggcgctcctccatgagtgtg

SEQ ID NO: 13846 - DNA, 20 bp, Homo Sapiens
gcgctcctccatgagtgtgg

SEQ ID NO: 13847 - DNA, 20 bp, Homo Sapiens
cgctcctccatgagtgtgga

SEQ ID NO: 13848 - DNA, 20 bp, Homo Sapiens
gctcctccatgagtgtggag

SEQ ID NO: 13849 - DNA, 20 bp, Homo Sapiens
ctcctccatgagtgtggagg

SEQ ID NO: 13850 - DNA, 20 bp, Homo Sapiens
tcctccatgagtgtggaggc

SEQ ID NO: 13851 - DNA, 20 bp, Homo Sapiens
cctccatgagtgtggaggcc

SEQ ID NO: 13852 - DNA, 20 bp, Homo Sapiens
ctccatgagtgtggaggccg

SEQ ID NO: 13853 - DNA, 20 bp, Homo Sapiens
tccatgagtgtggaggccga

SEQ ID NO: 13854 - DNA, 20 bp, Homo Sapiens
ccatgagtgtggaggccgag

SEQ ID NO: 13855 - DNA, 20 bp, Homo Sapiens
catgagtgtggaggccgaga

SEQ ID NO: 13856 - DNA, 20 bp, Homo Sapiens
atgagtgtggaggccgagac

SEQ ID NO: 13857 - DNA, 20 bp, Homo Sapiens
tgagtgtggaggccgagacc

SEQ ID NO: 13858 - DNA, 20 bp, Homo Sapiens
gagtgtggaggccgagacca

SEQ ID NO: 13859 - DNA, 20 bp, Homo Sapiens
agtgtggaggccgagaccac

SEQ ID NO: 13860 - DNA, 20 bp, Homo Sapiens
gtgtggaggccgagaccacc

SEQ ID NO: 13861 - DNA, 20 bp, Homo Sapiens
tgtggaggccgagaccacca

SEQ ID NO: 13862 - DNA, 20 bp, Homo Sapiens
gtggaggccgagaccaccac

SEQ ID NO: 13863 - DNA, 20 bp, Homo Sapiens
tggaggccgagaccaccacc

SEQ ID NO: 13864 - DNA, 20 bp, Homo Sapiens
ggaggccgagaccaccacca

SEQ ID NO: 13865 - DNA, 20 bp, Homo Sapiens
gaggccgagaccaccaccac

SEQ ID NO: 13866 - DNA, 20 bp, Homo Sapiens
aggccgagaccaccaccacc

SEQ ID NO: 13867 - DNA, 20 bp, Homo Sapiens
ggccgagaccaccaccacct

SEQ ID NO: 13868 - DNA, 20 bp, Homo Sapiens
gccgagaccaccaccacctt

SEQ ID NO: 13869 - DNA, 20 bp, Homo Sapiens
ccgagaccaccaccaccttc

SEQ ID NO: 13870 - DNA, 20 bp, Homo Sapiens
cgagaccaccaccaccttct

SEQ ID NO: 13871 - DNA, 20 bp, Homo Sapiens
gagaccaccaccaccttctc

SEQ ID NO: 13872 - DNA, 20 bp, Homo Sapiens
agaccaccaccaccttctcc

SEQ ID NO: 13873 - DNA, 20 bp, Homo Sapiens
gaccaccaccaccttctccc

SEQ ID NO: 13874 - DNA, 20 bp, Homo Sapiens
accaccaccaccttctcccc

SEQ ID NO: 13875 - DNA, 20 bp, Homo Sapiens
ccaccaccaccttctcccca

SEQ ID NO: 13876 - DNA, 20 bp, Homo Sapiens
caccaccaccttctccccat

SEQ ID NO: 13877 - DNA, 20 bp, Homo Sapiens
accaccaccttctccccata

SEQ ID NO: 13878 - DNA, 20 bp, Homo Sapiens
ccaccaccttctccccatag

SEQ ID NO: 13879 - DNA, 20 bp, Homo Sapiens
caccaccttctccccatagg

SEQ ID NO: 13880 - DNA, 20 bp, Homo Sapiens
accaccttctccccataggc

SEQ ID NO: 13881 - DNA, 20 bp, Homo Sapiens
ccaccttctccccataggcg

SEQ ID NO: 13882 - DNA, 20 bp, Homo Sapiens
caccttctccccataggcga

SEQ ID NO: 13883 - DNA, 20 bp, Homo Sapiens
accttctccccataggcgac

SEQ ID NO: 13884 - DNA, 20 bp, Homo Sapiens
ccttctccccataggcgact

SEQ ID NO: 13885 - DNA, 20 bp, Homo Sapiens
cttctccccataggcgactc

SEQ ID NO: 13886 - DNA, 20 bp, Homo Sapiens
ttctccccataggcgactct

SEQ ID NO: 13887 - DNA, 20 bp, Homo Sapiens
tctccccataggcgactctt

SEQ ID NO: 13888 - DNA, 20 bp, Homo Sapiens
ctccccataggcgactcttc

SEQ ID NO: 13889 - DNA, 20 bp, Homo Sapiens
tccccataggcgactcttct

SEQ ID NO: 13890 - DNA, 20 bp, Homo Sapiens
ccccataggcgactcttctg

SEQ ID NO: 13891 - DNA, 20 bp, Homo Sapiens
cccataggcgactcttctgc

SEQ ID NO: 13892 - DNA, 20 bp, Homo Sapiens
ccataggcgactcttctgcc

SEQ ID NO: 13893 - DNA, 20 bp, Homo Sapiens
cataggcgactcttctgcct

SEQ ID NO: 13894 - DNA, 20 bp, Homo Sapiens
ataggcgactcttctgcctg

SEQ ID NO: 13895 - DNA, 20 bp, Homo Sapiens
taggcgactcttctgcctgg

SEQ ID NO: 13896 - DNA, 20 bp, Homo Sapiens
aggcgactcttctgcctgga

SEQ ID NO: 13897 - DNA, 20 bp, Homo Sapiens
ggcgactcttctgcctggac

SEQ ID NO: 13898 - DNA, 20 bp, Homo Sapiens
gcgactcttctgcctggact

SEQ ID NO: 13899 - DNA, 20 bp, Homo Sapiens
cgactcttctgcctggacta

SEQ ID NO: 13900 - DNA, 20 bp, Homo Sapiens
gactcttctgcctggactag

SEQ ID NO: 13901 - DNA, 20 bp, Homo Sapiens
actcttctgcctggactaga

SEQ ID NO: 13902 - DNA, 20 bp, Homo Sapiens
ctcttctgcctggactagag

SEQ ID NO: 13903 - DNA, 20 bp, Homo Sapiens
tcttctgcctggactagagg

SEQ ID NO: 13904 - DNA, 20 bp, Homo Sapiens
cttctgcctggactagaggg

SEQ ID NO: 13905 - DNA, 20 bp, Homo Sapiens
ttctgcctggactagaggga

SEQ ID NO: 13906 - DNA, 20 bp, Homo Sapiens
tctgcctggactagagggac

SEQ ID NO: 13907 - DNA, 20 bp, Homo Sapiens
ctgcctggactagagggacc

SEQ ID NO: 13908 - DNA, 20 bp, Homo Sapiens
tgcctggactagagggacct

SEQ ID NO: 13909 - DNA, 20 bp, Homo Sapiens
gcctggactagagggacctc

SEQ ID NO: 13910 - DNA, 20 bp, Homo Sapiens
cctggactagagggacctct

SEQ ID NO: 13911 - DNA, 20 bp, Homo Sapiens
ctggactagagggacctctc

SEQ ID NO: 13912 - DNA, 20 bp, Homo Sapiens
tggactagagggacctctcc

SEQ ID NO: 13913 - DNA, 20 bp, Homo Sapiens
ggactagagggacctctccc

SEQ ID NO: 13914 - DNA, 20 bp, Homo Sapiens
gactagagggacctctccca

SEQ ID NO: 13915 - DNA, 20 bp, Homo Sapiens
actagagggacctctcccag

SEQ ID NO: 13916 - DNA, 20 bp, Homo Sapiens
ctagagggacctctcccagg

SEQ ID NO: 13917 - DNA, 20 bp, Homo Sapiens
tagagggacctctcccaggg

SEQ ID NO: 13918 - DNA, 20 bp, Homo Sapiens
agagggacctctcccagggt

SEQ ID NO: 13919 - DNA, 20 bp, Homo Sapiens
gagggacctctcccagggtc

SEQ ID NO: 13920 - DNA, 20 bp, Homo Sapiens
agggacctctcccagggtcc

SEQ ID NO: 13921 - DNA, 20 bp, Homo Sapiens
gggacctctcccagggtccc

SEQ ID NO: 13922 - DNA, 20 bp, Homo Sapiens
ggacctctcccagggtccct

SEQ ID NO: 13923 - DNA, 20 bp, Homo Sapiens
gacctctcccagggtccctg

SEQ ID NO: 13924 - DNA, 20 bp, Homo Sapiens
acctctcccagggtccctgg

SEQ ID NO: 13925 - DNA, 20 bp, Homo Sapiens
cctctcccagggtccctggg

SEQ ID NO: 13926 - DNA, 20 bp, Homo Sapiens
ctctcccagggtccctgggg

SEQ ID NO: 13927 - DNA, 20 bp, Homo Sapiens
tctcccagggtccctggggt

SEQ ID NO: 13928 - DNA, 20 bp, Homo Sapiens
ctcccagggtccctggggtg

SEQ ID NO: 13929 - DNA, 20 bp, Homo Sapiens
tcccagggtccctggggtgg

SEQ ID NO: 13930 - DNA, 20 bp, Homo Sapiens
cccagggtccctggggtggg

SEQ ID NO: 13931 - DNA, 20 bp, Homo Sapiens
ccagggtccctggggtgggg

SEQ ID NO: 13932 - DNA, 20 bp, Homo Sapiens
cagggtccctggggtgggga

SEQ ID NO: 13933 - DNA, 20 bp, Homo Sapiens
agggtccctggggtggggat

SEQ ID NO: 13934 - DNA, 20 bp, Homo Sapiens
gggtccctggggtggggata

SEQ ID NO: 13935 - DNA, 20 bp, Homo Sapiens
ggtccctggggtggggatag

SEQ ID NO: 13936 - DNA, 20 bp, Homo Sapiens
gtccctggggtggggatagg

SEQ ID NO: 13937 - DNA, 20 bp, Homo Sapiens
tccctggggtggggataggg

SEQ ID NO: 13938 - DNA, 20 bp, Homo Sapiens
ccctggggtggggataggga

SEQ ID NO: 13939 - DNA, 20 bp, Homo Sapiens
cctggggtggggatagggag

SEQ ID NO: 13940 - DNA, 20 bp, Homo Sapiens
ctggggtggggatagggagc

SEQ ID NO: 13941 - DNA, 20 bp, Homo Sapiens
tggggtggggatagggagca

SEQ ID NO: 13942 - DNA, 20 bp, Homo Sapiens
ggggtggggatagggagcag

SEQ ID NO: 13943 - DNA, 20 bp, Homo Sapiens
gggtggggatagggagcaga

SEQ ID NO: 13944 - DNA, 20 bp, Homo Sapiens
ggtggggatagggagcagat

SEQ ID NO: 13945 - DNA, 20 bp, Homo Sapiens
gtggggatagggagcagatg

SEQ ID NO: 13946 - DNA, 20 bp, Homo Sapiens
tggggatagggagcagatgc

SEQ ID NO: 13947 - DNA, 20 bp, Homo Sapiens
ggggatagggagcagatgca

SEQ ID NO: 13948 - DNA, 20 bp, Homo Sapiens
gggatagggagcagatgcaa

SEQ ID NO: 13949 - DNA, 20 bp, Homo Sapiens
ggatagggagcagatgcaat

SEQ ID NO: 13950 - DNA, 20 bp, Homo Sapiens
gatagggagcagatgcaatg

SEQ ID NO: 13951 - DNA, 20 bp, Homo Sapiens
atagggagcagatgcaatga

SEQ ID NO: 13952 - DNA, 20 bp, Homo Sapiens
tagggagcagatgcaatgac

SEQ ID NO: 13953 - DNA, 20 bp, Homo Sapiens
agggagcagatgcaatgact

SEQ ID NO: 13954 - DNA, 20 bp, Homo Sapiens
gggagcagatgcaatgactc

SEQ ID NO: 13955 - DNA, 20 bp, Homo Sapiens
ggagcagatgcaatgactca

SEQ ID NO: 13956 - DNA, 20 bp, Homo Sapiens
gagcagatgcaatgactcag

SEQ ID NO: 13957 - DNA, 20 bp, Homo Sapiens
agcagatgcaatgactcagg

SEQ ID NO: 13958 - DNA, 20 bp, Homo Sapiens
gcagatgcaatgactcagga

SEQ ID NO: 13959 - DNA, 20 bp, Homo Sapiens
cagatgcaatgactcaggac

SEQ ID NO: 13960 - DNA, 20 bp, Homo Sapiens
agatgcaatgactcaggaca

SEQ ID NO: 13961 - DNA, 20 bp, Homo Sapiens
gatgcaatgactcaggacat

SEQ ID NO: 13962 - DNA, 20 bp, Homo Sapiens
atgcaatgactcaggacatc

SEQ ID NO: 13963 - DNA, 20 bp, Homo Sapiens
tgcaatgactcaggacatcc

SEQ ID NO: 13964 - DNA, 20 bp, Homo Sapiens
gcaatgactcaggacatccc

SEQ ID NO: 13965 - DNA, 20 bp, Homo Sapiens
caatgactcaggacatcccc

SEQ ID NO: 13966 - DNA, 20 bp, Homo Sapiens
aatgactcaggacatccccc

SEQ ID NO: 13967 - DNA, 20 bp, Homo Sapiens
atgactcaggacatcccccc

SEQ ID NO: 13968 - DNA, 20 bp, Homo Sapiens
tgactcaggacatccccccg

SEQ ID NO: 13969 - DNA, 20 bp, Homo Sapiens
gactcaggacatccccccgc

SEQ ID NO: 13970 - DNA, 20 bp, Homo Sapiens
actcaggacatccccccgcc

SEQ ID NO: 13971 - DNA, 20 bp, Homo Sapiens
ctcaggacatccccccgcca

SEQ ID NO: 13972 - DNA, 20 bp, Homo Sapiens
tcaggacatccccccgccaa

SEQ ID NO: 13973 - DNA, 20 bp, Homo Sapiens
caggacatccccccgccaaa

SEQ ID NO: 13974 - DNA, 20 bp, Homo Sapiens
aggacatccccccgccaaaa

SEQ ID NO: 13975 - DNA, 20 bp, Homo Sapiens
ggacatccccccgccaaaag

SEQ ID NO: 13976 - DNA, 20 bp, Homo Sapiens
gacatccccccgccaaaagc

SEQ ID NO: 13977 - DNA, 20 bp, Homo Sapiens
acatccccccgccaaaagct

SEQ ID NO: 13978 - DNA, 20 bp, Homo Sapiens
catccccccgccaaaagctg

SEQ ID NO: 13979 - DNA, 20 bp, Homo Sapiens
atccccccgccaaaagctgc

SEQ ID NO: 13980 - DNA, 20 bp, Homo Sapiens
tccccccgccaaaagctgct

SEQ ID NO: 13981 - DNA, 20 bp, Homo Sapiens
ccccccgccaaaagctgctc

SEQ ID NO: 13982 - DNA, 20 bp, Homo Sapiens
cccccgccaaaagctgctca

SEQ ID NO: 13983 - DNA, 20 bp, Homo Sapiens
ccccgccaaaagctgctcag

SEQ ID NO: 13984 - DNA, 20 bp, Homo Sapiens
cccgccaaaagctgctcagg

SEQ ID NO: 13985 - DNA, 20 bp, Homo Sapiens
ccgccaaaagctgctcaggg

SEQ ID NO: 13986 - DNA, 20 bp, Homo Sapiens
cgccaaaagctgctcaggga

SEQ ID NO: 13987 - DNA, 20 bp, Homo Sapiens
gccaaaagctgctcagggaa

SEQ ID NO: 13988 - DNA, 20 bp, Homo Sapiens
ccaaaagctgctcagggaaa

SEQ ID NO: 13989 - DNA, 20 bp, Homo Sapiens
caaaagctgctcagggaaaa

SEQ ID NO: 13990 - DNA, 20 bp, Homo Sapiens
aaaagctgctcagggaaaag

SEQ ID NO: 13991 - DNA, 20 bp, Homo Sapiens
aaagctgctcagggaaaagc

SEQ ID NO: 13992 - DNA, 20 bp, Homo Sapiens
aagctgctcagggaaaagca

SEQ ID NO: 13993 - DNA, 20 bp, Homo Sapiens
agctgctcagggaaaagcag

SEQ ID NO: 13994 - DNA, 20 bp, Homo Sapiens
gctgctcagggaaaagcagc

SEQ ID NO: 13995 - DNA, 20 bp, Homo Sapiens
ctgctcagggaaaagcagct

SEQ ID NO: 13996 - DNA, 20 bp, Homo Sapiens
tgctcagggaaaagcagctc

SEQ ID NO: 13997 - DNA, 20 bp, Homo Sapiens
gctcagggaaaagcagctct

SEQ ID NO: 13998 - DNA, 20 bp, Homo Sapiens
ctcagggaaaagcagctctc

SEQ ID NO: 13999 - DNA, 20 bp, Homo Sapiens
tcagggaaaagcagctctcc

SEQ ID NO: 14000 - DNA, 20 bp, Homo Sapiens
cagggaaaagcagctctccc

SEQ ID NO: 14001 - DNA, 20 bp, Homo Sapiens
agggaaaagcagctctcccc

SEQ ID NO: 14002 - DNA, 20 bp, Homo Sapiens
gggaaaagcagctctcccct

SEQ ID NO: 14003 - DNA, 20 bp, Homo Sapiens
ggaaaagcagctctcccctc

SEQ ID NO: 14004 - DNA, 20 bp, Homo Sapiens
gaaaagcagctctcccctca

SEQ ID NO: 14005 - DNA, 20 bp, Homo Sapiens
aaaagcagctctcccctcag

SEQ ID NO: 14006 - DNA, 20 bp, Homo Sapiens
aaagcagctctcccctcaga

SEQ ID NO: 14007 - DNA, 20 bp, Homo Sapiens
aagcagctctcccctcagag

SEQ ID NO: 14008 - DNA, 20 bp, Homo Sapiens
agcagctctcccctcagagt

SEQ ID NO: 14009 - DNA, 20 bp, Homo Sapiens
gcagctctcccctcagagtg

SEQ ID NO: 14010 - DNA, 20 bp, Homo Sapiens
cagctctcccctcagagtgc

SEQ ID NO: 14011 - DNA, 20 bp, Homo Sapiens
agctctcccctcagagtgca

SEQ ID NO: 14012 - DNA, 20 bp, Homo Sapiens
gctctcccctcagagtgcaa

SEQ ID NO: 14013 - DNA, 20 bp, Homo Sapiens
ctctcccctcagagtgcaag

SEQ ID NO: 14014 - DNA, 20 bp, Homo Sapiens
tctcccctcagagtgcaagc

SEQ ID NO: 14015 - DNA, 20 bp, Homo Sapiens
ctcccctcagagtgcaagcc

SEQ ID NO: 14016 - DNA, 20 bp, Homo Sapiens
tcccctcagagtgcaagccc

SEQ ID NO: 14017 - DNA, 20 bp, Homo Sapiens
cccctcagagtgcaagcccc

SEQ ID NO: 14018 - DNA, 20 bp, Homo Sapiens
ccctcagagtgcaagcccct

SEQ ID NO: 14019 - DNA, 20 bp, Homo Sapiens
cctcagagtgcaagcccctg

SEQ ID NO: 14020 - DNA, 20 bp, Homo Sapiens
ctcagagtgcaagcccctgc

SEQ ID NO: 14021 - DNA, 20 bp, Homo Sapiens
tcagagtgcaagcccctgct

SEQ ID NO: 14022 - DNA, 20 bp, Homo Sapiens
cagagtgcaagcccctgctc

SEQ ID NO: 14023 - DNA, 20 bp, Homo Sapiens
agagtgcaagcccctgctcc

SEQ ID NO: 14024 - DNA, 20 bp, Homo Sapiens
gagtgcaagcccctgctcca

SEQ ID NO: 14025 - DNA, 20 bp, Homo Sapiens
agtgcaagcccctgctccag

SEQ ID NO: 14026 - DNA, 20 bp, Homo Sapiens
gtgcaagcccctgctccaga

SEQ ID NO: 14027 - DNA, 20 bp, Homo Sapiens
tgcaagcccctgctccagaa

SEQ ID NO: 14028 - DNA, 20 bp, Homo Sapiens
gcaagcccctgctccagaag

SEQ ID NO: 14029 - DNA, 20 bp, Homo Sapiens
caagcccctgctccagaaga

SEQ ID NO: 14030 - DNA, 20 bp, Homo Sapiens
aagcccctgctccagaagat

SEQ ID NO: 14031 - DNA, 20 bp, Homo Sapiens
agcccctgctccagaagata

SEQ ID NO: 14032 - DNA, 20 bp, Homo Sapiens
gcccctgctccagaagatag

SEQ ID NO: 14033 - DNA, 20 bp, Homo Sapiens
cccctgctccagaagatagc

SEQ ID NO: 14034 - DNA, 20 bp, Homo Sapiens
ccctgctccagaagatagct

SEQ ID NO: 14035 - DNA, 20 bp, Homo Sapiens
cctgctccagaagatagctt

SEQ ID NO: 14036 - DNA, 20 bp, Homo Sapiens
ctgctccagaagatagcttc

SEQ ID NO: 14037 - DNA, 20 bp, Homo Sapiens
tgctccagaagatagcttca

SEQ ID NO: 14038 - DNA, 20 bp, Homo Sapiens
gctccagaagatagcttcac

SEQ ID NO: 14039 - DNA, 20 bp, Homo Sapiens
ctccagaagatagcttcacc

SEQ ID NO: 14040 - DNA, 20 bp, Homo Sapiens
tccagaagatagcttcaccc

SEQ ID NO: 14041 - DNA, 20 bp, Homo Sapiens
ccagaagatagcttcacccc

SEQ ID NO: 14042 - DNA, 20 bp, Homo Sapiens
cagaagatagcttcacccca

SEQ ID NO: 14043 - DNA, 20 bp, Homo Sapiens
agaagatagcttcaccccaa

SEQ ID NO: 14044 - DNA, 20 bp, Homo Sapiens
gaagatagcttcaccccaat

SEQ ID NO: 14045 - DNA, 20 bp, Homo Sapiens
aagatagcttcaccccaatc

SEQ ID NO: 14046 - DNA, 20 bp, Homo Sapiens
agatagcttcaccccaatcc

SEQ ID NO: 14047 - DNA, 20 bp, Homo Sapiens
gatagcttcaccccaatccc

SEQ ID NO: 14048 - DNA, 20 bp, Homo Sapiens
atagcttcaccccaatccca

SEQ ID NO: 14049 - DNA, 20 bp, Homo Sapiens
tagcttcaccccaatcccag

SEQ ID NO: 14050 - DNA, 20 bp, Homo Sapiens
agcttcaccccaatcccagc

SEQ ID NO: 14051 - DNA, 20 bp, Homo Sapiens
gcttcaccccaatcccagct

SEQ ID NO: 14052 - DNA, 20 bp, Homo Sapiens
cttcaccccaatcccagcta

SEQ ID NO: 14053 - DNA, 20 bp, Homo Sapiens
ttcaccccaatcccagctac

SEQ ID NO: 14054 - DNA, 20 bp, Homo Sapiens
tcaccccaatcccagctacc

SEQ ID NO: 14055 - DNA, 20 bp, Homo Sapiens
caccccaatcccagctacct

SEQ ID NO: 14056 - DNA, 20 bp, Homo Sapiens
accccaatcccagctacctc

SEQ ID NO: 14057 - DNA, 20 bp, Homo Sapiens
ccccaatcccagctacctca

SEQ ID NO: 14058 - DNA, 20 bp, Homo Sapiens
cccaatcccagctacctcaa

SEQ ID NO: 14059 - DNA, 20 bp, Homo Sapiens
ccaatcccagctacctcaac

SEQ ID NO: 14060 - DNA, 20 bp, Homo Sapiens
caatcccagctacctcaacc

SEQ ID NO: 14061 - DNA, 20 bp, Homo Sapiens
aatcccagctacctcaacca

SEQ ID NO: 14062 - DNA, 20 bp, Homo Sapiens
atcccagctacctcaaccaa

SEQ ID NO: 14063 - DNA, 20 bp, Homo Sapiens
tcccagctacctcaaccaat

SEQ ID NO: 14064 - DNA, 20 bp, Homo Sapiens
cccagctacctcaaccaatg

SEQ ID NO: 14065 - DNA, 20 bp, Homo Sapiens
ccagctacctcaaccaatgc

SEQ ID NO: 14066 - DNA, 20 bp, Homo Sapiens
cagctacctcaaccaatgcc

SEQ ID NO: 14067 - DNA, 20 bp, Homo Sapiens
agctacctcaaccaatgcca

SEQ ID NO: 14068 - DNA, 20 bp, Homo Sapiens
gctacctcaaccaatgccaa

SEQ ID NO: 14069 - DNA, 20 bp, Homo Sapiens
ctacctcaaccaatgccaaa

SEQ ID NO: 14070 - DNA, 20 bp, Homo Sapiens
tacctcaaccaatgccaaaa

SEQ ID NO: 14071 - DNA, 20 bp, Homo Sapiens
acctcaaccaatgccaaaaa

SEQ ID NO: 14072 - DNA, 20 bp, Homo Sapiens
cctcaaccaatgccaaaaaa

SEQ ID NO: 14073 - DNA, 20 bp, Homo Sapiens
ctcaaccaatgccaaaaaaa

SEQ ID NO: 14074 - DNA, 20 bp, Homo Sapiens
tcaaccaatgccaaaaaaag

SEQ ID NO: 14075 - DNA, 20 bp, Homo Sapiens
caaccaatgccaaaaaaaga

SEQ ID NO: 14076 - DNA, 20 bp, Homo Sapiens
aaccaatgccaaaaaaagac

SEQ ID NO: 14077 - DNA, 20 bp, Homo Sapiens
accaatgccaaaaaaagaca

SEQ ID NO: 14078 - DNA, 20 bp, Homo Sapiens
ccaatgccaaaaaaagacag

SEQ ID NO: 14079 - DNA, 20 bp, Homo Sapiens
caatgccaaaaaaagacagg

SEQ ID NO: 14080 - DNA, 20 bp, Homo Sapiens
aatgccaaaaaaagacaggg

SEQ ID NO: 14081 - DNA, 20 bp, Homo Sapiens
atgccaaaaaaagacagggc

SEQ ID NO: 14082 - DNA, 20 bp, Homo Sapiens
tgccaaaaaaagacagggct

SEQ ID NO: 14083 - DNA, 20 bp, Homo Sapiens
gccaaaaaaagacagggctg

SEQ ID NO: 14084 - DNA, 20 bp, Homo Sapiens
ccaaaaaaagacagggctga

SEQ ID NO: 14085 - DNA, 20 bp, Homo Sapiens
caaaaaaagacagggctgat

SEQ ID NO: 14086 - DNA, 20 bp, Homo Sapiens
aaaaaaagacagggctgata

SEQ ID NO: 14087 - DNA, 20 bp, Homo Sapiens
aaaaaagacagggctgataa

SEQ ID NO: 14088 - DNA, 20 bp, Homo Sapiens
aaaaagacagggctgataag

SEQ ID NO: 14089 - DNA, 20 bp, Homo Sapiens
aaaagacagggctgataagc

SEQ ID NO: 14090 - DNA, 20 bp, Homo Sapiens
aaagacagggctgataagct

SEQ ID NO: 14091 - DNA, 20 bp, Homo Sapiens
aagacagggctgataagcta

SEQ ID NO: 14092 - DNA, 20 bp, Homo Sapiens
agacagggctgataagctaa

SEQ ID NO: 14093 - DNA, 20 bp, Homo Sapiens
gacagggctgataagctaac

SEQ ID NO: 14094 - DNA, 20 bp, Homo Sapiens
acagggctgataagctaaca

SEQ ID NO: 14095 - DNA, 20 bp, Homo Sapiens
cagggctgataagctaacac

SEQ ID NO: 14096 - DNA, 20 bp, Homo Sapiens
agggctgataagctaacacc

SEQ ID NO: 14097 - DNA, 20 bp, Homo Sapiens
gggctgataagctaacacca

SEQ ID NO: 14098 - DNA, 20 bp, Homo Sapiens
ggctgataagctaacaccag

SEQ ID NO: 14099 - DNA, 20 bp, Homo Sapiens
gctgataagctaacaccaga

SEQ ID NO: 14100 - DNA, 20 bp, Homo Sapiens
ctgataagctaacaccagac

SEQ ID NO: 14101 - DNA, 20 bp, Homo Sapiens
tgataagctaacaccagaca

SEQ ID NO: 14102 - DNA, 20 bp, Homo Sapiens
gataagctaacaccagacag

SEQ ID NO: 14103 - DNA, 20 bp, Homo Sapiens
ataagctaacaccagacaga

SEQ ID NO: 14104 - DNA, 20 bp, Homo Sapiens
taagctaacaccagacagac

SEQ ID NO: 14105 - DNA, 20 bp, Homo Sapiens
aagctaacaccagacagaca

SEQ ID NO: 14106 - DNA, 20 bp, Homo Sapiens
agctaacaccagacagacaa

SEQ ID NO: 14107 - DNA, 20 bp, Homo Sapiens
gctaacaccagacagacaac

SEQ ID NO: 14108 - DNA, 20 bp, Homo Sapiens
ctaacaccagacagacaaca

SEQ ID NO: 14109 - DNA, 20 bp, Homo Sapiens
taacaccagacagacaacac

SEQ ID NO: 14110 - DNA, 20 bp, Homo Sapiens
aacaccagacagacaacact

SEQ ID NO: 14111 - DNA, 20 bp, Homo Sapiens
acaccagacagacaacactg

SEQ ID NO: 14112 - DNA, 20 bp, Homo Sapiens
caccagacagacaacactgg

SEQ ID NO: 14113 - DNA, 20 bp, Homo Sapiens
accagacagacaacactggg

SEQ ID NO: 14114 - DNA, 20 bp, Homo Sapiens
ccagacagacaacactggga

SEQ ID NO: 14115 - DNA, 20 bp, Homo Sapiens
cagacagacaacactgggaa

SEQ ID NO: 14116 - DNA, 20 bp, Homo Sapiens
agacagacaacactgggaaa

SEQ ID NO: 14117 - DNA, 20 bp, Homo Sapiens
gacagacaacactgggaaac

SEQ ID NO: 14118 - DNA, 20 bp, Homo Sapiens
acagacaacactgggaaaca

SEQ ID NO: 14119 - DNA, 20 bp, Homo Sapiens
cagacaacactgggaaacag

SEQ ID NO: 14120 - DNA, 20 bp, Homo Sapiens
agacaacactgggaaacaga

SEQ ID NO: 14121 - DNA, 20 bp, Homo Sapiens
gacaacactgggaaacagag

SEQ ID NO: 14122 - DNA, 20 bp, Homo Sapiens
acaacactgggaaacagagg

SEQ ID NO: 14123 - DNA, 20 bp, Homo Sapiens
caacactgggaaacagaggc

SEQ ID NO: 14124 - DNA, 20 bp, Homo Sapiens
aacactgggaaacagaggct

SEQ ID NO: 14125 - DNA, 20 bp, Homo Sapiens
acactgggaaacagaggcta

SEQ ID NO: 14126 - DNA, 20 bp, Homo Sapiens
cactgggaaacagaggctat

SEQ ID NO: 14127 - DNA, 20 bp, Homo Sapiens
actgggaaacagaggctatt

SEQ ID NO: 14128 - DNA, 20 bp, Homo Sapiens
ctgggaaacagaggctattg

SEQ ID NO: 14129 - DNA, 20 bp, Homo Sapiens
tgggaaacagaggctattgt

SEQ ID NO: 14130 - DNA, 20 bp, Homo Sapiens
gggaaacagaggctattgtc

SEQ ID NO: 14131 - DNA, 20 bp, Homo Sapiens
ggaaacagaggctattgtcc

SEQ ID NO: 14132 - DNA, 20 bp, Homo Sapiens
gaaacagaggctattgtccc

SEQ ID NO: 14133 - DNA, 20 bp, Homo Sapiens
aaacagaggctattgtcccc

SEQ ID NO: 14134 - DNA, 20 bp, Homo Sapiens
aacagaggctattgtcccct

SEQ ID NO: 14135 - DNA, 20 bp, Homo Sapiens
acagaggctattgtccccta

SEQ ID NO: 14136 - DNA, 20 bp, Homo Sapiens
cagaggctattgtcccctaa

SEQ ID NO: 14137 - DNA, 20 bp, Homo Sapiens
agaggctattgtcccctaaa

SEQ ID NO: 14138 - DNA, 20 bp, Homo Sapiens
gaggctattgtcccctaaac

SEQ ID NO: 14139 - DNA, 20 bp, Homo Sapiens
aggctattgtcccctaaacc

SEQ ID NO: 14140 - DNA, 20 bp, Homo Sapiens
ggctattgtcccctaaacca

SEQ ID NO: 14141 - DNA, 20 bp, Homo Sapiens
gctattgtcccctaaaccaa

SEQ ID NO: 14142 - DNA, 20 bp, Homo Sapiens
ctattgtcccctaaaccaaa

SEQ ID NO: 14143 - DNA, 20 bp, Homo Sapiens
tattgtcccctaaaccaaaa

SEQ ID NO: 14144 - DNA, 20 bp, Homo Sapiens
attgtcccctaaaccaaaaa

SEQ ID NO: 14145 - DNA, 20 bp, Homo Sapiens
ttgtcccctaaaccaaaaac

SEQ ID NO: 14146 - DNA, 20 bp, Homo Sapiens
tgtcccctaaaccaaaaact

SEQ ID NO: 14147 - DNA, 20 bp, Homo Sapiens
gtcccctaaaccaaaaactg

SEQ ID NO: 14148 - DNA, 20 bp, Homo Sapiens
tcccctaaaccaaaaactga

SEQ ID NO: 14149 - DNA, 20 bp, Homo Sapiens
cccctaaaccaaaaactgaa

SEQ ID NO: 14150 - DNA, 20 bp, Homo Sapiens
ccctaaaccaaaaactgaaa

SEQ ID NO: 14151 - DNA, 20 bp, Homo Sapiens
cctaaaccaaaaactgaaag

SEQ ID NO: 14152 - DNA, 20 bp, Homo Sapiens
ctaaaccaaaaactgaaagt

SEQ ID NO: 14153 - DNA, 20 bp, Homo Sapiens
taaaccaaaaactgaaagtg

SEQ ID NO: 14154 - DNA, 20 bp, Homo Sapiens
aaaccaaaaactgaaagtga

SEQ ID NO: 14155 - DNA, 20 bp, Homo Sapiens
aaccaaaaactgaaagtgaa

SEQ ID NO: 14156 - DNA, 20 bp, Homo Sapiens
accaaaaactgaaagtgaaa

SEQ ID NO: 14157 - DNA, 20 bp, Homo Sapiens
ccaaaaactgaaagtgaaag

SEQ ID NO: 14158 - DNA, 20 bp, Homo Sapiens
caaaaactgaaagtgaaagt

SEQ ID NO: 14159 - DNA, 20 bp, Homo Sapiens
aaaaactgaaagtgaaagtc

SEQ ID NO: 14160 - DNA, 20 bp, Homo Sapiens
aaaactgaaagtgaaagtcc

SEQ ID NO: 14161 - DNA, 20 bp, Homo Sapiens
aaactgaaagtgaaagtcca

SEQ ID NO: 14162 - DNA, 20 bp, Homo Sapiens
aactgaaagtgaaagtccag

SEQ ID NO: 14163 - DNA, 20 bp, Homo Sapiens
actgaaagtgaaagtccaga

SEQ ID NO: 14164 - DNA, 20 bp, Homo Sapiens
ctgaaagtgaaagtccagaa

SEQ ID NO: 14165 - DNA, 20 bp, Homo Sapiens
tgaaagtgaaagtccagaaa

SEQ ID NO: 14166 - DNA, 20 bp, Homo Sapiens
gaaagtgaaagtccagaaac

SEQ ID NO: 14167 - DNA, 20 bp, Homo Sapiens
aaagtgaaagtccagaaact

SEQ ID NO: 14168 - DNA, 20 bp, Homo Sapiens
aagtgaaagtccagaaactg

SEQ ID NO: 14169 - DNA, 20 bp, Homo Sapiens
agtgaaagtccagaaactgt

SEQ ID NO: 14170 - DNA, 20 bp, Homo Sapiens
gtgaaagtccagaaactgtt

SEQ ID NO: 14171 - DNA, 20 bp, Homo Sapiens
tgaaagtccagaaactgttc

SEQ ID NO: 14172 - DNA, 20 bp, Homo Sapiens
gaaagtccagaaactgttcc

SEQ ID NO: 14173 - DNA, 20 bp, Homo Sapiens
aaagtccagaaactgttccc

SEQ ID NO: 14174 - DNA, 20 bp, Homo Sapiens
aagtccagaaactgttccca

SEQ ID NO: 14175 - DNA, 20 bp, Homo Sapiens
agtccagaaactgttcccac

SEQ ID NO: 14176 - DNA, 20 bp, Homo Sapiens
gtccagaaactgttcccacc

SEQ ID NO: 14177 - DNA, 20 bp, Homo Sapiens
tccagaaactgttcccacct

SEQ ID NO: 14178 - DNA, 20 bp, Homo Sapiens
ccagaaactgttcccacctg

SEQ ID NO: 14179 - DNA, 20 bp, Homo Sapiens
cagaaactgttcccacctgc

SEQ ID NO: 14180 - DNA, 20 bp, Homo Sapiens
agaaactgttcccacctgct

SEQ ID NO: 14181 - DNA, 20 bp, Homo Sapiens
gaaactgttcccacctgctg

SEQ ID NO: 14182 - DNA, 20 bp, Homo Sapiens
aaactgttcccacctgctgg

SEQ ID NO: 14183 - DNA, 20 bp, Homo Sapiens
aactgttcccacctgctgga

SEQ ID NO: 14184 - DNA, 20 bp, Homo Sapiens
actgttcccacctgctggag

SEQ ID NO: 14185 - DNA, 20 bp, Homo Sapiens
ctgttcccacctgctggagt

SEQ ID NO: 14186 - DNA, 20 bp, Homo Sapiens
tgttcccacctgctggagtg

SEQ ID NO: 14187 - DNA, 20 bp, Homo Sapiens
gttcccacctgctggagtga

SEQ ID NO: 14188 - DNA, 20 bp, Homo Sapiens
ttcccacctgctggagtgaa

SEQ ID NO: 14189 - DNA, 20 bp, Homo Sapiens
tcccacctgctggagtgaag

SEQ ID NO: 14190 - DNA, 20 bp, Homo Sapiens
cccacctgctggagtgaagg

SEQ ID NO: 14191 - DNA, 20 bp, Homo Sapiens
ccacctgctggagtgaaggg

SEQ ID NO: 14192 - DNA, 20 bp, Homo Sapiens
cacctgctggagtgaagggg

SEQ ID NO: 14193 - DNA, 20 bp, Homo Sapiens
acctgctggagtgaaggggc

SEQ ID NO: 14194 - DNA, 20 bp, Homo Sapiens
cctgctggagtgaaggggcc

SEQ ID NO: 14195 - DNA, 20 bp, Homo Sapiens
ctgctggagtgaaggggcca

SEQ ID NO: 14196 - DNA, 20 bp, Homo Sapiens
tgctggagtgaaggggccaa

SEQ ID NO: 14197 - DNA, 20 bp, Homo Sapiens
gctggagtgaaggggccaag

SEQ ID NO: 14198 - DNA, 20 bp, Homo Sapiens
ctggagtgaaggggccaagg

SEQ ID NO: 14199 - DNA, 20 bp, Homo Sapiens
tggagtgaaggggccaagga

SEQ ID NO: 14200 - DNA, 20 bp, Homo Sapiens
ggagtgaaggggccaaggag

SEQ ID NO: 14201 - DNA, 20 bp, Homo Sapiens
gagtgaaggggccaaggagg

SEQ ID NO: 14202 - DNA, 20 bp, Homo Sapiens
agtgaaggggccaaggaggg

SEQ ID NO: 14203 - DNA, 20 bp, Homo Sapiens
gtgaaggggccaaggagggt

SEQ ID NO: 14204 - DNA, 20 bp, Homo Sapiens
tgaaggggccaaggagggtg

SEQ ID NO: 14205 - DNA, 20 bp, Homo Sapiens
gaaggggccaaggagggtga

SEQ ID NO: 14206 - DNA, 20 bp, Homo Sapiens
aaggggccaaggagggtgag

SEQ ID NO: 14207 - DNA, 20 bp, Homo Sapiens
aggggccaaggagggtgagt

SEQ ID NO: 14208 - DNA, 20 bp, Homo Sapiens
ggggccaaggagggtgagtg

SEQ ID NO: 14209 - DNA, 20 bp, Homo Sapiens
gggccaaggagggtgagtgc

SEQ ID NO: 14210 - DNA, 20 bp, Homo Sapiens
ggccaaggagggtgagtgca

SEQ ID NO: 14211 - DNA, 20 bp, Homo Sapiens
gccaaggagggtgagtgcaa

SEQ ID NO: 14212 - DNA, 20 bp, Homo Sapiens
ccaaggagggtgagtgcaag

SEQ ID NO: 14213 - DNA, 20 bp, Homo Sapiens
caaggagggtgagtgcaagg

SEQ ID NO: 14214 - DNA, 20 bp, Homo Sapiens
aaggagggtgagtgcaaggg

SEQ ID NO: 14215 - DNA, 20 bp, Homo Sapiens
aggagggtgagtgcaagggg

SEQ ID NO: 14216 - DNA, 20 bp, Homo Sapiens
ggagggtgagtgcaaggggc

SEQ ID NO: 14217 - DNA, 20 bp, Homo Sapiens
gagggtgagtgcaaggggcg

SEQ ID NO: 14218 - DNA, 20 bp, Homo Sapiens
agggtgagtgcaaggggcgt

SEQ ID NO: 14219 - DNA, 20 bp, Homo Sapiens
gggtgagtgcaaggggcgtg

SEQ ID NO: 14220 - DNA, 20 bp, Homo Sapiens
ggtgagtgcaaggggcgtgg

SEQ ID NO: 14221 - DNA, 20 bp, Homo Sapiens
gtgagtgcaaggggcgtggg

SEQ ID NO: 14222 - DNA, 20 bp, Homo Sapiens
tgagtgcaaggggcgtggga

SEQ ID NO: 14223 - DNA, 20 bp, Homo Sapiens
gagtgcaaggggcgtgggag

SEQ ID NO: 14224 - DNA, 20 bp, Homo Sapiens
agtgcaaggggcgtgggagt

SEQ ID NO: 14225 - DNA, 20 bp, Homo Sapiens
gtgcaaggggcgtgggagtg

SEQ ID NO: 14226 - DNA, 20 bp, Homo Sapiens
tgcaaggggcgtgggagtgg

SEQ ID NO: 14227 - DNA, 20 bp, Homo Sapiens
gcaaggggcgtgggagtggc

SEQ ID NO: 14228 - DNA, 20 bp, Homo Sapiens
caaggggcgtgggagtggcc

SEQ ID NO: 14229 - DNA, 20 bp, Homo Sapiens
aaggggcgtgggagtggcct

SEQ ID NO: 14230 - DNA, 20 bp, Homo Sapiens
aggggcgtgggagtggcctg

SEQ ID NO: 14231 - DNA, 20 bp, Homo Sapiens
ggggcgtgggagtggcctga

SEQ ID NO: 14232 - DNA, 20 bp, Homo Sapiens
gggcgtgggagtggcctgaa

SEQ ID NO: 14233 - DNA, 20 bp, Homo Sapiens
ggcgtgggagtggcctgaag

SEQ ID NO: 14234 - DNA, 20 bp, Homo Sapiens
gcgtgggagtggcctgaaga

SEQ ID NO: 14235 - DNA, 20 bp, Homo Sapiens
cgtgggagtggcctgaagag

SEQ ID NO: 14236 - DNA, 20 bp, Homo Sapiens
gtgggagtggcctgaagagt

SEQ ID NO: 14237 - DNA, 20 bp, Homo Sapiens
tgggagtggcctgaagagtc

SEQ ID NO: 14238 - DNA, 20 bp, Homo Sapiens
gggagtggcctgaagagtcc

SEQ ID NO: 14239 - DNA, 20 bp, Homo Sapiens
ggagtggcctgaagagtcct

SEQ ID NO: 14240 - DNA, 20 bp, Homo Sapiens
gagtggcctgaagagtcctc

SEQ ID NO: 14241 - DNA, 20 bp, Homo Sapiens
agtggcctgaagagtcctct

SEQ ID NO: 14242 - DNA, 20 bp, Homo Sapiens
gtggcctgaagagtcctctg

SEQ ID NO: 14243 - DNA, 20 bp, Homo Sapiens
tggcctgaagagtcctctga

SEQ ID NO: 14244 - DNA, 20 bp, Homo Sapiens
ggcctgaagagtcctctgaa

SEQ ID NO: 14245 - DNA, 20 bp, Homo Sapiens
gcctgaagagtcctctgaat

SEQ ID NO: 14246 - DNA, 20 bp, Homo Sapiens
cctgaagagtcctctgaatg

SEQ ID NO: 14247 - DNA, 20 bp, Homo Sapiens
ctgaagagtcctctgaatga

SEQ ID NO: 14248 - DNA, 20 bp, Homo Sapiens
tgaagagtcctctgaatgaa

SEQ ID NO: 14249 - DNA, 20 bp, Homo Sapiens
gaagagtcctctgaatgaac

SEQ ID NO: 14250 - DNA, 20 bp, Homo Sapiens
aagagtcctctgaatgaacc

SEQ ID NO: 14251 - DNA, 20 bp, Homo Sapiens
agagtcctctgaatgaacct

SEQ ID NO: 14252 - DNA, 20 bp, Homo Sapiens
gagtcctctgaatgaacctt

SEQ ID NO: 14253 - DNA, 20 bp, Homo Sapiens
agtcctctgaatgaaccttc

SEQ ID NO: 14254 - DNA, 20 bp, Homo Sapiens
gtcctctgaatgaaccttct

SEQ ID NO: 14255 - DNA, 20 bp, Homo Sapiens
tcctctgaatgaaccttctg

SEQ ID NO: 14256 - DNA, 20 bp, Homo Sapiens
cctctgaatgaaccttctgg

SEQ ID NO: 14257 - DNA, 20 bp, Homo Sapiens
ctctgaatgaaccttctggc

SEQ ID NO: 14258 - DNA, 20 bp, Homo Sapiens
tctgaatgaaccttctggcc

SEQ ID NO: 14259 - DNA, 20 bp, Homo Sapiens
ctgaatgaaccttctggcct

SEQ ID NO: 14260 - DNA, 20 bp, Homo Sapiens
tgaatgaaccttctggcctc

SEQ ID NO: 14261 - DNA, 20 bp, Homo Sapiens
gaatgaaccttctggcctcc

SEQ ID NO: 14262 - DNA, 20 bp, Homo Sapiens
aatgaaccttctggcctccc

SEQ ID NO: 14263 - DNA, 20 bp, Homo Sapiens
atgaaccttctggcctccca

SEQ ID NO: 14264 - DNA, 20 bp, Homo Sapiens
tgaaccttctggcctcccac

SEQ ID NO: 14265 - DNA, 20 bp, Homo Sapiens
gaaccttctggcctcccaca

SEQ ID NO: 14266 - DNA, 20 bp, Homo Sapiens
aaccttctggcctcccacag

SEQ ID NO: 14267 - DNA, 20 bp, Homo Sapiens
accttctggcctcccacaga

SEQ ID NO: 14268 - DNA, 20 bp, Homo Sapiens
ccttctggcctcccacagac

SEQ ID NO: 14269 - DNA, 20 bp, Homo Sapiens
cttctggcctcccacagact

SEQ ID NO: 14270 - DNA, 20 bp, Homo Sapiens
ttctggcctcccacagactc

SEQ ID NO: 14271 - DNA, 20 bp, Homo Sapiens
tctggcctcccacagactca

SEQ ID NO: 14272 - DNA, 20 bp, Homo Sapiens
ctggcctcccacagactcaa

SEQ ID NO: 14273 - DNA, 20 bp, Homo Sapiens
tggcctcccacagactcaaa

SEQ ID NO: 14274 - DNA, 20 bp, Homo Sapiens
ggcctcccacagactcaaat

SEQ ID NO: 14275 - DNA, 20 bp, Homo Sapiens
gcctcccacagactcaaatg

SEQ ID NO: 14276 - DNA, 20 bp, Homo Sapiens
cctcccacagactcaaatgc

SEQ ID NO: 14277 - DNA, 20 bp, Homo Sapiens
ctcccacagactcaaatgct

SEQ ID NO: 14278 - DNA, 20 bp, Homo Sapiens
tcccacagactcaaatgctc

SEQ ID NO: 14279 - DNA, 20 bp, Homo Sapiens
cccacagactcaaatgctca

SEQ ID NO: 14280 - DNA, 20 bp, Homo Sapiens
ccacagactcaaatgctcag

SEQ ID NO: 14281 - DNA, 20 bp, Homo Sapiens
cacagactcaaatgctcaga

SEQ ID NO: 14282 - DNA, 20 bp, Homo Sapiens
acagactcaaatgctcagac

SEQ ID NO: 14283 - DNA, 20 bp, Homo Sapiens
cagactcaaatgctcagacc

SEQ ID NO: 14284 - DNA, 20 bp, Homo Sapiens
agactcaaatgctcagacca

SEQ ID NO: 14285 - DNA, 20 bp, Homo Sapiens
gactcaaatgctcagaccag

SEQ ID NO: 14286 - DNA, 20 bp, Homo Sapiens
actcaaatgctcagaccagc

SEQ ID NO: 14287 - DNA, 20 bp, Homo Sapiens
ctcaaatgctcagaccagct

SEQ ID NO: 14288 - DNA, 20 bp, Homo Sapiens
tcaaatgctcagaccagctc

SEQ ID NO: 14289 - DNA, 20 bp, Homo Sapiens
caaatgctcagaccagctct

SEQ ID NO: 14290 - DNA, 20 bp, Homo Sapiens
aaatgctcagaccagctctt

SEQ ID NO: 14291 - DNA, 20 bp, Homo Sapiens
aatgctcagaccagctcttc

SEQ ID NO: 14292 - DNA, 20 bp, Homo Sapiens
atgctcagaccagctcttcc

SEQ ID NO: 14293 - DNA, 20 bp, Homo Sapiens
tgctcagaccagctcttccg

SEQ ID NO: 14294 - DNA, 20 bp, Homo Sapiens
gctcagaccagctcttccga

SEQ ID NO: 14295 - DNA, 20 bp, Homo Sapiens
ctcagaccagctcttccgaa

SEQ ID NO: 14296 - DNA, 20 bp, Homo Sapiens
tcagaccagctcttccgaaa

SEQ ID NO: 14297 - DNA, 20 bp, Homo Sapiens
cagaccagctcttccgaaaa

SEQ ID NO: 14298 - DNA, 20 bp, Homo Sapiens
agaccagctcttccgaaaac

SEQ ID NO: 14299 - DNA, 20 bp, Homo Sapiens
gaccagctcttccgaaaacc

SEQ ID NO: 14300 - DNA, 20 bp, Homo Sapiens
accagctcttccgaaaacca

SEQ ID NO: 14301 - DNA, 20 bp, Homo Sapiens
ccagctcttccgaaaaccag

SEQ ID NO: 14302 - DNA, 20 bp, Homo Sapiens
cagctcttccgaaaaccagg

SEQ ID NO: 14303 - DNA, 20 bp, Homo Sapiens
agctcttccgaaaaccaggc

SEQ ID NO: 14304 - DNA, 20 bp, Homo Sapiens
gctcttccgaaaaccaggcc

SEQ ID NO: 14305 - DNA, 20 bp, Homo Sapiens
ctcttccgaaaaccaggcct

SEQ ID NO: 14306 - DNA, 20 bp, Homo Sapiens
tcttccgaaaaccaggcctt

SEQ ID NO: 14307 - DNA, 20 bp, Homo Sapiens
cttccgaaaaccaggcctta

SEQ ID NO: 14308 - DNA, 20 bp, Homo Sapiens
ttccgaaaaccaggccttat

SEQ ID NO: 14309 - DNA, 20 bp, Homo Sapiens
tccgaaaaccaggccttatc

SEQ ID NO: 14310 - DNA, 20 bp, Homo Sapiens
ccgaaaaccaggccttatct

SEQ ID NO: 14311 - DNA, 20 bp, Homo Sapiens
cgaaaaccaggccttatctc

SEQ ID NO: 14312 - DNA, 20 bp, Homo Sapiens
gaaaaccaggccttatctcc

SEQ ID NO: 14313 - DNA, 20 bp, Homo Sapiens
aaaaccaggccttatctcca

SEQ ID NO: 14314 - DNA, 20 bp, Homo Sapiens
aaaccaggccttatctccaa

SEQ ID NO: 14315 - DNA, 20 bp, Homo Sapiens
aaccaggccttatctccaag

SEQ ID NO: 14316 - DNA, 20 bp, Homo Sapiens
accaggccttatctccaaga

SEQ ID NO: 14317 - DNA, 20 bp, Homo Sapiens
ccaggccttatctccaagac

SEQ ID NO: 14318 - DNA, 20 bp, Homo Sapiens
caggccttatctccaagacc

SEQ ID NO: 14319 - DNA, 20 bp, Homo Sapiens
aggccttatctccaagacca

SEQ ID NO: 14320 - DNA, 20 bp, Homo Sapiens
ggccttatctccaagaccag

SEQ ID NO: 14321 - DNA, 20 bp, Homo Sapiens
gccttatctccaagaccaga

SEQ ID NO: 14322 - DNA, 20 bp, Homo Sapiens
ccttatctccaagaccagag

SEQ ID NO: 14323 - DNA, 20 bp, Homo Sapiens
cttatctccaagaccagaga

SEQ ID NO: 14324 - DNA, 20 bp, Homo Sapiens
ttatctccaagaccagagat

SEQ ID NO: 14325 - DNA, 20 bp, Homo Sapiens
tatctccaagaccagagata

SEQ ID NO: 14326 - DNA, 20 bp, Homo Sapiens
atctccaagaccagagatag

SEQ ID NO: 14327 - DNA, 20 bp, Homo Sapiens
tctccaagaccagagatagt

SEQ ID NO: 14328 - DNA, 20 bp, Homo Sapiens
ctccaagaccagagatagtg

SEQ ID NO: 14329 - DNA, 20 bp, Homo Sapiens
tccaagaccagagatagtgg

SEQ ID NO: 14330 - DNA, 20 bp, Homo Sapiens
ccaagaccagagatagtggg

SEQ ID NO: 14331 - DNA, 20 bp, Homo Sapiens
caagaccagagatagtgggg

SEQ ID NO: 14332 - DNA, 20 bp, Homo Sapiens
aagaccagagatagtgggga

SEQ ID NO: 14333 - DNA, 20 bp, Homo Sapiens
agaccagagatagtggggag

SEQ ID NO: 14334 - DNA, 20 bp, Homo Sapiens
gaccagagatagtggggaga

SEQ ID NO: 14335 - DNA, 20 bp, Homo Sapiens
accagagatagtggggagac

SEQ ID NO: 14336 - DNA, 20 bp, Homo Sapiens
ccagagatagtggggagact

SEQ ID NO: 14337 - DNA, 20 bp, Homo Sapiens
cagagatagtggggagactt

SEQ ID NO: 14338 - DNA, 20 bp, Homo Sapiens
agagatagtggggagacttc

SEQ ID NO: 14339 - DNA, 20 bp, Homo Sapiens
gagatagtggggagacttct

SEQ ID NO: 14340 - DNA, 20 bp, Homo Sapiens
agatagtggggagacttctt

SEQ ID NO: 14341 - DNA, 20 bp, Homo Sapiens
gatagtggggagacttcttg

SEQ ID NO: 14342 - DNA, 20 bp, Homo Sapiens
atagtggggagacttcttgg

SEQ ID NO: 14343 - DNA, 20 bp, Homo Sapiens
tagtggggagacttcttggc

SEQ ID NO: 14344 - DNA, 20 bp, Homo Sapiens
agtggggagacttcttggct

SEQ ID NO: 14345 - DNA, 20 bp, Homo Sapiens
gtggggagacttcttggctt

SEQ ID NO: 14346 - DNA, 20 bp, Homo Sapiens
tggggagacttcttggcttg

SEQ ID NO: 14347 - DNA, 20 bp, Homo Sapiens
ggggagacttcttggcttgg

SEQ ID NO: 14348 - DNA, 20 bp, Homo Sapiens
gggagacttcttggcttggt

SEQ ID NO: 14349 - DNA, 20 bp, Homo Sapiens
ggagacttcttggcttggtg

SEQ ID NO: 14350 - DNA, 20 bp, Homo Sapiens
gagacttcttggcttggtga

SEQ ID NO: 14351 - DNA, 20 bp, Homo Sapiens
agacttcttggcttggtgag

SEQ ID NO: 14352 - DNA, 20 bp, Homo Sapiens
gacttcttggcttggtgagg

SEQ ID NO: 14353 - DNA, 20 bp, Homo Sapiens
acttcttggcttggtgagga

SEQ ID NO: 14354 - DNA, 20 bp, Homo Sapiens
cttcttggcttggtgaggaa

SEQ ID NO: 14355 - DNA, 20 bp, Homo Sapiens
ttcttggcttggtgaggaaa

SEQ ID NO: 14356 - DNA, 20 bp, Homo Sapiens
tcttggcttggtgaggaaaa

SEQ ID NO: 14357 - DNA, 20 bp, Homo Sapiens
cttggcttggtgaggaaaag

SEQ ID NO: 14358 - DNA, 20 bp, Homo Sapiens
ttggcttggtgaggaaaagc

SEQ ID NO: 14359 - DNA, 20 bp, Homo Sapiens
tggcttggtgaggaaaagcg

SEQ ID NO: 14360 - DNA, 20 bp, Homo Sapiens
ggcttggtgaggaaaagcgg

SEQ ID NO: 14361 - DNA, 20 bp, Homo Sapiens
gcttggtgaggaaaagcgga

SEQ ID NO: 14362 - DNA, 20 bp, Homo Sapiens
cttggtgaggaaaagcggac

SEQ ID NO: 14363 - DNA, 20 bp, Homo Sapiens
ttggtgaggaaaagcggaca

SEQ ID NO: 14364 - DNA, 20 bp, Homo Sapiens
tggtgaggaaaagcggacat

SEQ ID NO: 14365 - DNA, 20 bp, Homo Sapiens
ggtgaggaaaagcggacatc

SEQ ID NO: 14366 - DNA, 20 bp, Homo Sapiens
gtgaggaaaagcggacatca

SEQ ID NO: 14367 - DNA, 20 bp, Homo Sapiens
tgaggaaaagcggacatcag

SEQ ID NO: 14368 - DNA, 20 bp, Homo Sapiens
gaggaaaagcggacatcagc

SEQ ID NO: 14369 - DNA, 20 bp, Homo Sapiens
aggaaaagcggacatcagct

SEQ ID NO: 14370 - DNA, 20 bp, Homo Sapiens
ggaaaagcggacatcagctg

SEQ ID NO: 14371 - DNA, 20 bp, Homo Sapiens
gaaaagcggacatcagctgg

SEQ ID NO: 14372 - DNA, 20 bp, Homo Sapiens
aaaagcggacatcagctggt

SEQ ID NO: 14373 - DNA, 20 bp, Homo Sapiens
aaagcggacatcagctggtc

SEQ ID NO: 14374 - DNA, 20 bp, Homo Sapiens
aagcggacatcagctggtca

SEQ ID NO: 14375 - DNA, 20 bp, Homo Sapiens
agcggacatcagctggtcaa

SEQ ID NO: 14376 - DNA, 20 bp, Homo Sapiens
gcggacatcagctggtcaaa

SEQ ID NO: 14377 - DNA, 20 bp, Homo Sapiens
cggacatcagctggtcaaac

SEQ ID NO: 14378 - DNA, 20 bp, Homo Sapiens
ggacatcagctggtcaaaca

SEQ ID NO: 14379 - DNA, 20 bp, Homo Sapiens
gacatcagctggtcaaacaa

SEQ ID NO: 14380 - DNA, 20 bp, Homo Sapiens
acatcagctggtcaaacaaa

SEQ ID NO: 14381 - DNA, 20 bp, Homo Sapiens
catcagctggtcaaacaaac

SEQ ID NO: 14382 - DNA, 20 bp, Homo Sapiens
atcagctggtcaaacaaact

SEQ ID NO: 14383 - DNA, 20 bp, Homo Sapiens
tcagctggtcaaacaaactc

SEQ ID NO: 14384 - DNA, 20 bp, Homo Sapiens
cagctggtcaaacaaactct

SEQ ID NO: 14385 - DNA, 20 bp, Homo Sapiens
agctggtcaaacaaactctc

SEQ ID NO: 14386 - DNA, 20 bp, Homo Sapiens
gctggtcaaacaaactctct

SEQ ID NO: 14387 - DNA, 20 bp, Homo Sapiens
ctggtcaaacaaactctctg

SEQ ID NO: 14388 - DNA, 20 bp, Homo Sapiens
tggtcaaacaaactctctga

SEQ ID NO: 14389 - DNA, 20 bp, Homo Sapiens
ggtcaaacaaactctctgaa

SEQ ID NO: 14390 - DNA, 20 bp, Homo Sapiens
gtcaaacaaactctctgaac

SEQ ID NO: 14391 - DNA, 20 bp, Homo Sapiens
tcaaacaaactctctgaacc

SEQ ID NO: 14392 - DNA, 20 bp, Homo Sapiens
caaacaaactctctgaaccc

SEQ ID NO: 14393 - DNA, 20 bp, Homo Sapiens
aaacaaactctctgaacccc

SEQ ID NO: 14394 - DNA, 20 bp, Homo Sapiens
aacaaactctctgaacccct

SEQ ID NO: 14395 - DNA, 20 bp, Homo Sapiens
acaaactctctgaacccctc

SEQ ID NO: 14396 - DNA, 20 bp, Homo Sapiens
caaactctctgaacccctcc

SEQ ID NO: 14397 - DNA, 20 bp, Homo Sapiens
aaactctctgaacccctccc

SEQ ID NO: 14398 - DNA, 20 bp, Homo Sapiens
aactctctgaacccctccct

SEQ ID NO: 14399 - DNA, 20 bp, Homo Sapiens
actctctgaacccctccctc

SEQ ID NO: 14400 - DNA, 20 bp, Homo Sapiens
ctctctgaacccctccctcc

SEQ ID NO: 14401 - DNA, 20 bp, Homo Sapiens
tctctgaacccctccctcca

SEQ ID NO: 14402 - DNA, 20 bp, Homo Sapiens
ctctgaacccctccctccat

SEQ ID NO: 14403 - DNA, 20 bp, Homo Sapiens
tctgaacccctccctccatc

SEQ ID NO: 14404 - DNA, 20 bp, Homo Sapiens
ctgaacccctccctccatcg

SEQ ID NO: 14405 - DNA, 20 bp, Homo Sapiens
tgaacccctccctccatcgt

SEQ ID NO: 14406 - DNA, 20 bp, Homo Sapiens
gaacccctccctccatcgtt

SEQ ID NO: 14407 - DNA, 20 bp, Homo Sapiens
aacccctccctccatcgttt

SEQ ID NO: 14408 - DNA, 20 bp, Homo Sapiens
acccctccctccatcgtttt

SEQ ID NO: 14409 - DNA, 20 bp, Homo Sapiens
cccctccctccatcgttttc

SEQ ID NO: 14410 - DNA, 20 bp, Homo Sapiens
ccctccctccatcgttttct

SEQ ID NO: 14411 - DNA, 20 bp, Homo Sapiens
cctccctccatcgttttctt

SEQ ID NO: 14412 - DNA, 20 bp, Homo Sapiens
ctccctccatcgttttcttc

SEQ ID NO: 14413 - DNA, 20 bp, Homo Sapiens
tccctccatcgttttcttca

SEQ ID NO: 14414 - DNA, 20 bp, Homo Sapiens
ccctccatcgttttcttcac

SEQ ID NO: 14415 - DNA, 20 bp, Homo Sapiens
cctccatcgttttcttcact

SEQ ID NO: 14416 - DNA, 20 bp, Homo Sapiens
ctccatcgttttcttcactg

SEQ ID NO: 14417 - DNA, 20 bp, Homo Sapiens
tccatcgttttcttcactgt

SEQ ID NO: 14418 - DNA, 20 bp, Homo Sapiens
ccatcgttttcttcactgtc

SEQ ID NO: 14419 - DNA, 20 bp, Homo Sapiens
catcgttttcttcactgtcc

SEQ ID NO: 14420 - DNA, 20 bp, Homo Sapiens
atcgttttcttcactgtcct

SEQ ID NO: 14421 - DNA, 20 bp, Homo Sapiens
tcgttttcttcactgtcctc

SEQ ID NO: 14422 - DNA, 20 bp, Homo Sapiens
cgttttcttcactgtcctcc

SEQ ID NO: 14423 - DNA, 20 bp, Homo Sapiens
gttttcttcactgtcctcca

SEQ ID NO: 14424 - DNA, 20 bp, Homo Sapiens
ttttcttcactgtcctccaa

SEQ ID NO: 14425 - DNA, 20 bp, Homo Sapiens
tttcttcactgtcctccaag

SEQ ID NO: 14426 - DNA, 20 bp, Homo Sapiens
ttcttcactgtcctccaagc

SEQ ID NO: 14427 - DNA, 20 bp, Homo Sapiens
tcttcactgtcctccaagcc

SEQ ID NO: 14428 - DNA, 20 bp, Homo Sapiens
cttcactgtcctccaagcca

SEQ ID NO: 14429 - DNA, 20 bp, Homo Sapiens
ttcactgtcctccaagccag

SEQ ID NO: 14430 - DNA, 20 bp, Homo Sapiens
tcactgtcctccaagccagc

SEQ ID NO: 14431 - DNA, 20 bp, Homo Sapiens
cactgtcctccaagccagcg

SEQ ID NO: 14432 - DNA, 20 bp, Homo Sapiens
actgtcctccaagccagcgg

SEQ ID NO: 14433 - DNA, 20 bp, Homo Sapiens
ctgtcctccaagccagcggg

SEQ ID NO: 14434 - DNA, 20 bp, Homo Sapiens
tgtcctccaagccagcggga

SEQ ID NO: 14435 - DNA, 20 bp, Homo Sapiens
gtcctccaagccagcgggaa

SEQ ID NO: 14436 - DNA, 20 bp, Homo Sapiens
tcctccaagccagcgggaat

SEQ ID NO: 14437 - DNA, 20 bp, Homo Sapiens
cctccaagccagcgggaatg

SEQ ID NO: 14438 - DNA, 20 bp, Homo Sapiens
ctccaagccagcgggaatgg

SEQ ID NO: 14439 - DNA, 20 bp, Homo Sapiens
tccaagccagcgggaatggc

SEQ ID NO: 14440 - DNA, 20 bp, Homo Sapiens
ccaagccagcgggaatggca

SEQ ID NO: 14441 - DNA, 20 bp, Homo Sapiens
caagccagcgggaatggcag

SEQ ID NO: 14442 - DNA, 20 bp, Homo Sapiens
aagccagcgggaatggcagc

SEQ ID NO: 14443 - DNA, 20 bp, Homo Sapiens
agccagcgggaatggcagct

SEQ ID NO: 14444 - DNA, 20 bp, Homo Sapiens
gccagcgggaatggcagctg

SEQ ID NO: 14445 - DNA, 20 bp, Homo Sapiens
ccagcgggaatggcagctgc

SEQ ID NO: 14446 - DNA, 20 bp, Homo Sapiens
cagcgggaatggcagctgcc

SEQ ID NO: 14447 - DNA, 20 bp, Homo Sapiens
agcgggaatggcagctgcca

SEQ ID NO: 14448 - DNA, 20 bp, Homo Sapiens
gcgggaatggcagctgccac

SEQ ID NO: 14449 - DNA, 20 bp, Homo Sapiens
cgggaatggcagctgccacg

SEQ ID NO: 14450 - DNA, 20 bp, Homo Sapiens
gggaatggcagctgccacgc

SEQ ID NO: 14451 - DNA, 20 bp, Homo Sapiens
ggaatggcagctgccacgcc

SEQ ID NO: 14452 - DNA, 20 bp, Homo Sapiens
gaatggcagctgccacgccg

SEQ ID NO: 14453 - DNA, 20 bp, Homo Sapiens
aatggcagctgccacgccgc

SEQ ID NO: 14454 - DNA, 20 bp, Homo Sapiens
atggcagctgccacgccgcc

SEQ ID NO: 14455 - DNA, 20 bp, Homo Sapiens
tggcagctgccacgccgccc

SEQ ID NO: 14456 - DNA, 20 bp, Homo Sapiens
ggcagctgccacgccgccct

SEQ ID NO: 14457 - DNA, 20 bp, Homo Sapiens
gcagctgccacgccgcccta

SEQ ID NO: 14458 - DNA, 20 bp, Homo Sapiens
cagctgccacgccgccctaa

SEQ ID NO: 14459 - DNA, 20 bp, Homo Sapiens
agctgccacgccgccctaaa

SEQ ID NO: 14460 - DNA, 20 bp, Homo Sapiens
gctgccacgccgccctaaaa

SEQ ID NO: 14461 - DNA, 20 bp, Homo Sapiens
ctgccacgccgccctaaaag

SEQ ID NO: 14462 - DNA, 20 bp, Homo Sapiens
tgccacgccgccctaaaagc

SEQ ID NO: 14463 - DNA, 20 bp, Homo Sapiens
gccacgccgccctaaaagca

SEQ ID NO: 14464 - DNA, 20 bp, Homo Sapiens
ccacgccgccctaaaagcac

SEQ ID NO: 14465 - DNA, 20 bp, Homo Sapiens
cacgccgccctaaaagcaca

SEQ ID NO: 14466 - DNA, 20 bp, Homo Sapiens
acgccgccctaaaagcacac

SEQ ID NO: 14467 - DNA, 20 bp, Homo Sapiens
cgccgccctaaaagcacact

SEQ ID NO: 14468 - DNA, 20 bp, Homo Sapiens
gccgccctaaaagcacactc

SEQ ID NO: 14469 - DNA, 20 bp, Homo Sapiens
ccgccctaaaagcacactca

SEQ ID NO: 14470 - DNA, 20 bp, Homo Sapiens
cgccctaaaagcacactcat

SEQ ID NO: 14471 - DNA, 20 bp, Homo Sapiens
gccctaaaagcacactcatc

SEQ ID NO: 14472 - DNA, 20 bp, Homo Sapiens
ccctaaaagcacactcatcc

SEQ ID NO: 14473 - DNA, 20 bp, Homo Sapiens
cctaaaagcacactcatccc

SEQ ID NO: 14474 - DNA, 20 bp, Homo Sapiens
ctaaaagcacactcatcccc

SEQ ID NO: 14475 - DNA, 20 bp, Homo Sapiens
taaaagcacactcatcccct

SEQ ID NO: 14476 - DNA, 20 bp, Homo Sapiens
aaaagcacactcatcccctc

SEQ ID NO: 14477 - DNA, 20 bp, Homo Sapiens
aaagcacactcatcccctca

SEQ ID NO: 14478 - DNA, 20 bp, Homo Sapiens
aagcacactcatcccctcac

SEQ ID NO: 14479 - DNA, 20 bp, Homo Sapiens
agcacactcatcccctcact

SEQ ID NO: 14480 - DNA, 20 bp, Homo Sapiens
gcacactcatcccctcactt

SEQ ID NO: 14481 - DNA, 20 bp, Homo Sapiens
cacactcatcccctcacttg

SEQ ID NO: 14482 - DNA, 20 bp, Homo Sapiens
acactcatcccctcacttgc

SEQ ID NO: 14483 - DNA, 20 bp, Homo Sapiens
cactcatcccctcacttgcc

SEQ ID NO: 14484 - DNA, 20 bp, Homo Sapiens
actcatcccctcacttgccg

SEQ ID NO: 14485 - DNA, 20 bp, Homo Sapiens
ctcatcccctcacttgccgc

SEQ ID NO: 14486 - DNA, 20 bp, Homo Sapiens
tcatcccctcacttgccgcg

SEQ ID NO: 14487 - DNA, 20 bp, Homo Sapiens
catcccctcacttgccgcgt

SEQ ID NO: 14488 - DNA, 20 bp, Homo Sapiens
atcccctcacttgccgcgtc

SEQ ID NO: 14489 - DNA, 20 bp, Homo Sapiens
tcccctcacttgccgcgtcg

SEQ ID NO: 14490 - DNA, 20 bp, Homo Sapiens
cccctcacttgccgcgtcgc

SEQ ID NO: 14491 - DNA, 20 bp, Homo Sapiens
ccctcacttgccgcgtcgcc

SEQ ID NO: 14492 - DNA, 20 bp, Homo Sapiens
cctcacttgccgcgtcgccc

SEQ ID NO: 14493 - DNA, 20 bp, Homo Sapiens
ctcacttgccgcgtcgccct

SEQ ID NO: 14494 - DNA, 20 bp, Homo Sapiens
tcacttgccgcgtcgccctc

SEQ ID NO: 14495 - DNA, 20 bp, Homo Sapiens
cacttgccgcgtcgccctcc

SEQ ID NO: 14496 - DNA, 20 bp, Homo Sapiens
acttgccgcgtcgccctccc

SEQ ID NO: 14497 - DNA, 20 bp, Homo Sapiens
cttgccgcgtcgccctccca

SEQ ID NO: 14498 - DNA, 20 bp, Homo Sapiens
ttgccgcgtcgccctcccag

SEQ ID NO: 14499 - DNA, 20 bp, Homo Sapiens
tgccgcgtcgccctcccagg

SEQ ID NO: 14500 - DNA, 20 bp, Homo Sapiens
gccgcgtcgccctcccaggc

SEQ ID NO: 14501 - DNA, 20 bp, Homo Sapiens
ccgcgtcgccctcccaggct

SEQ ID NO: 14502 - DNA, 20 bp, Homo Sapiens
cgcgtcgccctcccaggctc

SEQ ID NO: 14503 - DNA, 20 bp, Homo Sapiens
gcgtcgccctcccaggctct

SEQ ID NO: 14504 - DNA, 20 bp, Homo Sapiens
cgtcgccctcccaggctctc

SEQ ID NO: 14505 - DNA, 20 bp, Homo Sapiens
gtcgccctcccaggctctca

SEQ ID NO: 14506 - DNA, 20 bp, Homo Sapiens
tcgccctcccaggctctcaa

SEQ ID NO: 14507 - DNA, 20 bp, Homo Sapiens
cgccctcccaggctctcaac

SEQ ID NO: 14508 - DNA, 20 bp, Homo Sapiens
gccctcccaggctctcaaca

SEQ ID NO: 14509 - DNA, 20 bp, Homo Sapiens
ccctcccaggctctcaacag

SEQ ID NO: 14510 - DNA, 20 bp, Homo Sapiens
cctcccaggctctcaacagg

SEQ ID NO: 14511 - DNA, 20 bp, Homo Sapiens
ctcccaggctctcaacaggg

SEQ ID NO: 14512 - DNA, 20 bp, Homo Sapiens
tcccaggctctcaacagggg

SEQ ID NO: 14513 - DNA, 20 bp, Homo Sapiens
cccaggctctcaacagggga

SEQ ID NO: 14514 - DNA, 20 bp, Homo Sapiens
ccaggctctcaacaggggag

SEQ ID NO: 14515 - DNA, 20 bp, Homo Sapiens
caggctctcaacaggggaga

SEQ ID NO: 14516 - DNA, 20 bp, Homo Sapiens
aggctctcaacaggggagag

SEQ ID NO: 14517 - DNA, 20 bp, Homo Sapiens
ggctctcaacaggggagagt

SEQ ID NO: 14518 - DNA, 20 bp, Homo Sapiens
gctctcaacaggggagagtg

SEQ ID NO: 14519 - DNA, 20 bp, Homo Sapiens
ctctcaacaggggagagtgt

SEQ ID NO: 14520 - DNA, 20 bp, Homo Sapiens
tctcaacaggggagagtgtg

SEQ ID NO: 14521 - DNA, 20 bp, Homo Sapiens
ctcaacaggggagagtgtgg

SEQ ID NO: 14522 - DNA, 20 bp, Homo Sapiens
tcaacaggggagagtgtggt

SEQ ID NO: 14523 - DNA, 20 bp, Homo Sapiens
caacaggggagagtgtggtg

SEQ ID NO: 14524 - DNA, 20 bp, Homo Sapiens
aacaggggagagtgtggtgt

SEQ ID NO: 14525 - DNA, 20 bp, Homo Sapiens
acaggggagagtgtggtgtt

SEQ ID NO: 14526 - DNA, 20 bp, Homo Sapiens
caggggagagtgtggtgttt

SEQ ID NO: 14527 - DNA, 20 bp, Homo Sapiens
aggggagagtgtggtgtttc

SEQ ID NO: 14528 - DNA, 20 bp, Homo Sapiens
ggggagagtgtggtgtttcc

SEQ ID NO: 14529 - DNA, 20 bp, Homo Sapiens
gggagagtgtggtgtttcct

SEQ ID NO: 14530 - DNA, 20 bp, Homo Sapiens
ggagagtgtggtgtttcctg

SEQ ID NO: 14531 - DNA, 20 bp, Homo Sapiens
gagagtgtggtgtttcctgc

SEQ ID NO: 14532 - DNA, 20 bp, Homo Sapiens
agagtgtggtgtttcctgca

SEQ ID NO: 14533 - DNA, 20 bp, Homo Sapiens
gagtgtggtgtttcctgcag

SEQ ID NO: 14534 - DNA, 20 bp, Homo Sapiens
agtgtggtgtttcctgcagg

SEQ ID NO: 14535 - DNA, 20 bp, Homo Sapiens
gtgtggtgtttcctgcaggc

SEQ ID NO: 14536 - DNA, 20 bp, Homo Sapiens
tgtggtgtttcctgcaggcc

SEQ ID NO: 14537 - DNA, 20 bp, Homo Sapiens
gtggtgtttcctgcaggcca

SEQ ID NO: 14538 - DNA, 20 bp, Homo Sapiens
tggtgtttcctgcaggccag

SEQ ID NO: 14539 - DNA, 20 bp, Homo Sapiens
ggtgtttcctgcaggccagg

SEQ ID NO: 14540 - DNA, 20 bp, Homo Sapiens
gtgtttcctgcaggccaggc

SEQ ID NO: 14541 - DNA, 20 bp, Homo Sapiens
tgtttcctgcaggccaggcc

SEQ ID NO: 14542 - DNA, 20 bp, Homo Sapiens
gtttcctgcaggccaggcca

SEQ ID NO: 14543 - DNA, 20 bp, Homo Sapiens
tttcctgcaggccaggccag

SEQ ID NO: 14544 - DNA, 20 bp, Homo Sapiens
ttcctgcaggccaggccagc

SEQ ID NO: 14545 - DNA, 20 bp, Homo Sapiens
tcctgcaggccaggccagct

SEQ ID NO: 14546 - DNA, 20 bp, Homo Sapiens
cctgcaggccaggccagctg

SEQ ID NO: 14547 - DNA, 20 bp, Homo Sapiens
ctgcaggccaggccagctgc

SEQ ID NO: 14548 - DNA, 20 bp, Homo Sapiens
tgcaggccaggccagctgcc

SEQ ID NO: 14549 - DNA, 20 bp, Homo Sapiens
gcaggccaggccagctgcct

SEQ ID NO: 14550 - DNA, 20 bp, Homo Sapiens
caggccaggccagctgcctc

SEQ ID NO: 14551 - DNA, 20 bp, Homo Sapiens
aggccaggccagctgcctcc

SEQ ID NO: 14552 - DNA, 20 bp, Homo Sapiens
ggccaggccagctgcctccg

SEQ ID NO: 14553 - DNA, 20 bp, Homo Sapiens
gccaggccagctgcctccgc

SEQ ID NO: 14554 - DNA, 20 bp, Homo Sapiens
ccaggccagctgcctccgcg

SEQ ID NO: 14555 - DNA, 20 bp, Homo Sapiens
caggccagctgcctccgcgt

SEQ ID NO: 14556 - DNA, 20 bp, Homo Sapiens
aggccagctgcctccgcgtg

SEQ ID NO: 14557 - DNA, 20 bp, Homo Sapiens
ggccagctgcctccgcgtga

SEQ ID NO: 14558 - DNA, 20 bp, Homo Sapiens
gccagctgcctccgcgtgat

SEQ ID NO: 14559 - DNA, 20 bp, Homo Sapiens
ccagctgcctccgcgtgatc

SEQ ID NO: 14560 - DNA, 20 bp, Homo Sapiens
cagctgcctccgcgtgatca

SEQ ID NO: 14561 - DNA, 20 bp, Homo Sapiens
agctgcctccgcgtgatcaa

SEQ ID NO: 14562 - DNA, 20 bp, Homo Sapiens
gctgcctccgcgtgatcaaa

SEQ ID NO: 14563 - DNA, 20 bp, Homo Sapiens
ctgcctccgcgtgatcaaag

SEQ ID NO: 14564 - DNA, 20 bp, Homo Sapiens
tgcctccgcgtgatcaaagc

SEQ ID NO: 14565 - DNA, 20 bp, Homo Sapiens
gcctccgcgtgatcaaagcc

SEQ ID NO: 14566 - DNA, 20 bp, Homo Sapiens
cctccgcgtgatcaaagcca

SEQ ID NO: 14567 - DNA, 20 bp, Homo Sapiens
ctccgcgtgatcaaagccac

SEQ ID NO: 14568 - DNA, 20 bp, Homo Sapiens
tccgcgtgatcaaagccaca

SEQ ID NO: 14569 - DNA, 20 bp, Homo Sapiens
ccgcgtgatcaaagccacac

SEQ ID NO: 14570 - DNA, 20 bp, Homo Sapiens
cgcgtgatcaaagccacact

SEQ ID NO: 14571 - DNA, 20 bp, Homo Sapiens
gcgtgatcaaagccacactc

SEQ ID NO: 14572 - DNA, 20 bp, Homo Sapiens
cgtgatcaaagccacactct

SEQ ID NO: 14573 - DNA, 20 bp, Homo Sapiens
gtgatcaaagccacactctg

SEQ ID NO: 14574 - DNA, 20 bp, Homo Sapiens
tgatcaaagccacactctgg

SEQ ID NO: 14575 - DNA, 20 bp, Homo Sapiens
gatcaaagccacactctggg

SEQ ID NO: 14576 - DNA, 20 bp, Homo Sapiens
atcaaagccacactctgggc

SEQ ID NO: 14577 - DNA, 20 bp, Homo Sapiens
tcaaagccacactctgggct

SEQ ID NO: 14578 - DNA, 20 bp, Homo Sapiens
caaagccacactctgggctc

SEQ ID NO: 14579 - DNA, 20 bp, Homo Sapiens
aaagccacactctgggctcc

SEQ ID NO: 14580 - DNA, 20 bp, Homo Sapiens
aagccacactctgggctcca

SEQ ID NO: 14581 - DNA, 20 bp, Homo Sapiens
agccacactctgggctccag

SEQ ID NO: 14582 - DNA, 20 bp, Homo Sapiens
gccacactctgggctccaga

SEQ ID NO: 14583 - DNA, 20 bp, Homo Sapiens
ccacactctgggctccagag

SEQ ID NO: 14584 - DNA, 20 bp, Homo Sapiens
cacactctgggctccagagt

SEQ ID NO: 14585 - DNA, 20 bp, Homo Sapiens
acactctgggctccagagtg

SEQ ID NO: 14586 - DNA, 20 bp, Homo Sapiens
cactctgggctccagagtgg

SEQ ID NO: 14587 - DNA, 20 bp, Homo Sapiens
actctgggctccagagtggg

SEQ ID NO: 14588 - DNA, 20 bp, Homo Sapiens
ctctgggctccagagtgggg

SEQ ID NO: 14589 - DNA, 20 bp, Homo Sapiens
tctgggctccagagtgggga

SEQ ID NO: 14590 - DNA, 20 bp, Homo Sapiens
ctgggctccagagtggggat

SEQ ID NO: 14591 - DNA, 20 bp, Homo Sapiens
tgggctccagagtggggatg

SEQ ID NO: 14592 - DNA, 20 bp, Homo Sapiens
gggctccagagtggggatga

SEQ ID NO: 14593 - DNA, 20 bp, Homo Sapiens
ggctccagagtggggatgac

SEQ ID NO: 14594 - DNA, 20 bp, Homo Sapiens
gctccagagtggggatgaca

SEQ ID NO: 14595 - DNA, 20 bp, Homo Sapiens
ctccagagtggggatgacat

SEQ ID NO: 14596 - DNA, 20 bp, Homo Sapiens
tccagagtggggatgacatg

SEQ ID NO: 14597 - DNA, 20 bp, Homo Sapiens
ccagagtggggatgacatgc

SEQ ID NO: 14598 - DNA, 20 bp, Homo Sapiens
cagagtggggatgacatgca

SEQ ID NO: 14599 - DNA, 20 bp, Homo Sapiens
agagtggggatgacatgcac

SEQ ID NO: 14600 - DNA, 20 bp, Homo Sapiens
gagtggggatgacatgcact

SEQ ID NO: 14601 - DNA, 20 bp, Homo Sapiens
agtggggatgacatgcactc

SEQ ID NO: 14602 - DNA, 20 bp, Homo Sapiens
gtggggatgacatgcactca

SEQ ID NO: 14603 - DNA, 20 bp, Homo Sapiens
tggggatgacatgcactcag

SEQ ID NO: 14604 - DNA, 20 bp, Homo Sapiens
ggggatgacatgcactcagc

SEQ ID NO: 14605 - DNA, 20 bp, Homo Sapiens
gggatgacatgcactcagct

SEQ ID NO: 14606 - DNA, 20 bp, Homo Sapiens
ggatgacatgcactcagctc

SEQ ID NO: 14607 - DNA, 20 bp, Homo Sapiens
gatgacatgcactcagctct

SEQ ID NO: 14608 - DNA, 20 bp, Homo Sapiens
atgacatgcactcagctctt

SEQ ID NO: 14609 - DNA, 20 bp, Homo Sapiens
tgacatgcactcagctcttg

SEQ ID NO: 14610 - DNA, 20 bp, Homo Sapiens
gacatgcactcagctcttgg

SEQ ID NO: 14611 - DNA, 20 bp, Homo Sapiens
acatgcactcagctcttggc

SEQ ID NO: 14612 - DNA, 20 bp, Homo Sapiens
catgcactcagctcttggct

SEQ ID NO: 14613 - DNA, 20 bp, Homo Sapiens
atgcactcagctcttggctc

SEQ ID NO: 14614 - DNA, 20 bp, Homo Sapiens
tgcactcagctcttggctcc

SEQ ID NO: 14615 - DNA, 20 bp, Homo Sapiens
gcactcagctcttggctcca

SEQ ID NO: 14616 - DNA, 20 bp, Homo Sapiens
cactcagctcttggctccac

SEQ ID NO: 14617 - DNA, 20 bp, Homo Sapiens
actcagctcttggctccact

SEQ ID NO: 14618 - DNA, 20 bp, Homo Sapiens
ctcagctcttggctccactg

SEQ ID NO: 14619 - DNA, 20 bp, Homo Sapiens
tcagctcttggctccactgg

SEQ ID NO: 14620 - DNA, 20 bp, Homo Sapiens
cagctcttggctccactggg

SEQ ID NO: 14621 - DNA, 20 bp, Homo Sapiens
agctcttggctccactggga

SEQ ID NO: 14622 - DNA, 20 bp, Homo Sapiens
gctcttggctccactgggat

SEQ ID NO: 14623 - DNA, 20 bp, Homo Sapiens
ctcttggctccactgggatg

SEQ ID NO: 14624 - DNA, 20 bp, Homo Sapiens
tcttggctccactgggatgg

SEQ ID NO: 14625 - DNA, 20 bp, Homo Sapiens
cttggctccactgggatggg

SEQ ID NO: 14626 - DNA, 20 bp, Homo Sapiens
ttggctccactgggatggga

SEQ ID NO: 14627 - DNA, 20 bp, Homo Sapiens
tggctccactgggatgggag

SEQ ID NO: 14628 - DNA, 20 bp, Homo Sapiens
ggctccactgggatgggagg

SEQ ID NO: 14629 - DNA, 20 bp, Homo Sapiens
gctccactgggatgggagga

SEQ ID NO: 14630 - DNA, 20 bp, Homo Sapiens
ctccactgggatgggaggag

SEQ ID NO: 14631 - DNA, 20 bp, Homo Sapiens
tccactgggatgggaggaga

SEQ ID NO: 14632 - DNA, 20 bp, Homo Sapiens
ccactgggatgggaggagag

SEQ ID NO: 14633 - DNA, 20 bp, Homo Sapiens
cactgggatgggaggagagg

SEQ ID NO: 14634 - DNA, 20 bp, Homo Sapiens
actgggatgggaggagagga

SEQ ID NO: 14635 - DNA, 20 bp, Homo Sapiens
ctgggatgggaggagaggac

SEQ ID NO: 14636 - DNA, 20 bp, Homo Sapiens
tgggatgggaggagaggaca

SEQ ID NO: 14637 - DNA, 20 bp, Homo Sapiens
gggatgggaggagaggacaa

SEQ ID NO: 14638 - DNA, 20 bp, Homo Sapiens
ggatgggaggagaggacaag

SEQ ID NO: 14639 - DNA, 20 bp, Homo Sapiens
gatgggaggagaggacaagg

SEQ ID NO: 14640 - DNA, 20 bp, Homo Sapiens
atgggaggagaggacaaggg

SEQ ID NO: 14641 - DNA, 20 bp, Homo Sapiens
tgggaggagaggacaaggga

SEQ ID NO: 14642 - DNA, 20 bp, Homo Sapiens
gggaggagaggacaagggaa

SEQ ID NO: 14643 - DNA, 20 bp, Homo Sapiens
ggaggagaggacaagggaaa

SEQ ID NO: 14644 - DNA, 20 bp, Homo Sapiens
gaggagaggacaagggaaat

SEQ ID NO: 14645 - DNA, 20 bp, Homo Sapiens
aggagaggacaagggaaatg

SEQ ID NO: 14646 - DNA, 20 bp, Homo Sapiens
ggagaggacaagggaaatgt

SEQ ID NO: 14647 - DNA, 20 bp, Homo Sapiens
gagaggacaagggaaatgtc

SEQ ID NO: 14648 - DNA, 20 bp, Homo Sapiens
agaggacaagggaaatgtca

SEQ ID NO: 14649 - DNA, 20 bp, Homo Sapiens
gaggacaagggaaatgtcag

SEQ ID NO: 14650 - DNA, 20 bp, Homo Sapiens
aggacaagggaaatgtcagg

SEQ ID NO: 14651 - DNA, 20 bp, Homo Sapiens
ggacaagggaaatgtcaggg

SEQ ID NO: 14652 - DNA, 20 bp, Homo Sapiens
gacaagggaaatgtcagggg

SEQ ID NO: 14653 - DNA, 20 bp, Homo Sapiens
acaagggaaatgtcaggggc

SEQ ID NO: 14654 - DNA, 20 bp, Homo Sapiens
caagggaaatgtcaggggcg

SEQ ID NO: 14655 - DNA, 20 bp, Homo Sapiens
aagggaaatgtcaggggcgg

SEQ ID NO: 14656 - DNA, 20 bp, Homo Sapiens
agggaaatgtcaggggcggg

SEQ ID NO: 14657 - DNA, 20 bp, Homo Sapiens
gggaaatgtcaggggcgggg

SEQ ID NO: 14658 - DNA, 20 bp, Homo Sapiens
ggaaatgtcaggggcgggga

SEQ ID NO: 14659 - DNA, 20 bp, Homo Sapiens
gaaatgtcaggggcggggag

SEQ ID NO: 14660 - DNA, 20 bp, Homo Sapiens
aaatgtcaggggcggggagg

SEQ ID NO: 14661 - DNA, 20 bp, Homo Sapiens
aatgtcaggggcggggaggg

SEQ ID NO: 14662 - DNA, 20 bp, Homo Sapiens
atgtcaggggcggggagggt

SEQ ID NO: 14663 - DNA, 20 bp, Homo Sapiens
tgtcaggggcggggagggtg

SEQ ID NO: 14664 - DNA, 20 bp, Homo Sapiens
gtcaggggcggggagggtga

SEQ ID NO: 14665 - DNA, 20 bp, Homo Sapiens
tcaggggcggggagggtgac

SEQ ID NO: 14666 - DNA, 20 bp, Homo Sapiens
caggggcggggagggtgaca

SEQ ID NO: 14667 - DNA, 20 bp, Homo Sapiens
aggggcggggagggtgacag

SEQ ID NO: 14668 - DNA, 20 bp, Homo Sapiens
ggggcggggagggtgacagt

SEQ ID NO: 14669 - DNA, 20 bp, Homo Sapiens
gggcggggagggtgacagtg

SEQ ID NO: 14670 - DNA, 20 bp, Homo Sapiens
ggcggggagggtgacagtgg

SEQ ID NO: 14671 - DNA, 20 bp, Homo Sapiens
gcggggagggtgacagtggc

SEQ ID NO: 14672 - DNA, 20 bp, Homo Sapiens
cggggagggtgacagtggcc

SEQ ID NO: 14673 - DNA, 20 bp, Homo Sapiens
ggggagggtgacagtggccg

SEQ ID NO: 14674 - DNA, 20 bp, Homo Sapiens
gggagggtgacagtggccgc

SEQ ID NO: 14675 - DNA, 20 bp, Homo Sapiens
ggagggtgacagtggccgcc

SEQ ID NO: 14676 - DNA, 20 bp, Homo Sapiens
gagggtgacagtggccgccc

SEQ ID NO: 14677 - DNA, 20 bp, Homo Sapiens
agggtgacagtggccgccca

SEQ ID NO: 14678 - DNA, 20 bp, Homo Sapiens
gggtgacagtggccgcccaa

SEQ ID NO: 14679 - DNA, 20 bp, Homo Sapiens
ggtgacagtggccgcccaag

SEQ ID NO: 14680 - DNA, 20 bp, Homo Sapiens
gtgacagtggccgcccaagg

SEQ ID NO: 14681 - DNA, 20 bp, Homo Sapiens
tgacagtggccgcccaaggc

SEQ ID NO: 14682 - DNA, 20 bp, Homo Sapiens
gacagtggccgcccaaggcc

SEQ ID NO: 14683 - DNA, 20 bp, Homo Sapiens
acagtggccgcccaaggccc

SEQ ID NO: 14684 - DNA, 20 bp, Homo Sapiens
cagtggccgcccaaggccca

SEQ ID NO: 14685 - DNA, 20 bp, Homo Sapiens
agtggccgcccaaggcccac

SEQ ID NO: 14686 - DNA, 20 bp, Homo Sapiens
gtggccgcccaaggcccacg

SEQ ID NO: 14687 - DNA, 20 bp, Homo Sapiens
tggccgcccaaggcccacga

SEQ ID NO: 14688 - DNA, 20 bp, Homo Sapiens
ggccgcccaaggcccacgag

SEQ ID NO: 14689 - DNA, 20 bp, Homo Sapiens
gccgcccaaggcccacgagc

SEQ ID NO: 14690 - DNA, 20 bp, Homo Sapiens
ccgcccaaggcccacgagct

SEQ ID NO: 14691 - DNA, 20 bp, Homo Sapiens
cgcccaaggcccacgagctt

SEQ ID NO: 14692 - DNA, 20 bp, Homo Sapiens
gcccaaggcccacgagcttg

SEQ ID NO: 14693 - DNA, 20 bp, Homo Sapiens
cccaaggcccacgagcttgt

SEQ ID NO: 14694 - DNA, 20 bp, Homo Sapiens
ccaaggcccacgagcttgtt

SEQ ID NO: 14695 - DNA, 20 bp, Homo Sapiens
caaggcccacgagcttgttc

SEQ ID NO: 14696 - DNA, 20 bp, Homo Sapiens
aaggcccacgagcttgttct

SEQ ID NO: 14697 - DNA, 20 bp, Homo Sapiens
aggcccacgagcttgttctt

SEQ ID NO: 14698 - DNA, 20 bp, Homo Sapiens
ggcccacgagcttgttcttt

SEQ ID NO: 14699 - DNA, 20 bp, Homo Sapiens
gcccacgagcttgttctttg

SEQ ID NO: 14700 - DNA, 20 bp, Homo Sapiens
cccacgagcttgttctttgt

SEQ ID NO: 14701 - DNA, 20 bp, Homo Sapiens
ccacgagcttgttctttgtt

SEQ ID NO: 14702 - DNA, 20 bp, Homo Sapiens
cacgagcttgttctttgttc

SEQ ID NO: 14703 - DNA, 20 bp, Homo Sapiens
acgagcttgttctttgttct

SEQ ID NO: 14704 - DNA, 20 bp, Homo Sapiens
cgagcttgttctttgttctt

SEQ ID NO: 14705 - DNA, 20 bp, Homo Sapiens
gagcttgttctttgttcttt

SEQ ID NO: 14706 - DNA, 20 bp, Homo Sapiens
agcttgttctttgttctttg

SEQ ID NO: 14707 - DNA, 20 bp, Homo Sapiens
gcttgttctttgttctttgt

SEQ ID NO: 14708 - DNA, 20 bp, Homo Sapiens
cttgttctttgttctttgtc

SEQ ID NO: 14709 - DNA, 20 bp, Homo Sapiens
ttgttctttgttctttgtca

SEQ ID NO: 14710 - DNA, 20 bp, Homo Sapiens
tgttctttgttctttgtcac

SEQ ID NO: 14711 - DNA, 20 bp, Homo Sapiens
gttctttgttctttgtcaca

SEQ ID NO: 14712 - DNA, 20 bp, Homo Sapiens
ttctttgttctttgtcacag

SEQ ID NO: 14713 - DNA, 20 bp, Homo Sapiens
tctttgttctttgtcacagg

SEQ ID NO: 14714 - DNA, 20 bp, Homo Sapiens
ctttgttctttgtcacaggg

SEQ ID NO: 14715 - DNA, 20 bp, Homo Sapiens
tttgttctttgtcacaggga

SEQ ID NO: 14716 - DNA, 20 bp, Homo Sapiens
ttgttctttgtcacagggac

SEQ ID NO: 14717 - DNA, 20 bp, Homo Sapiens
tgttctttgtcacagggact

SEQ ID NO: 14718 - DNA, 20 bp, Homo Sapiens
gttctttgtcacagggactg

SEQ ID NO: 14719 - DNA, 20 bp, Homo Sapiens
ttctttgtcacagggactga

SEQ ID NO: 14720 - DNA, 20 bp, Homo Sapiens
tctttgtcacagggactgaa

SEQ ID NO: 14721 - DNA, 20 bp, Homo Sapiens
ctttgtcacagggactgaaa

SEQ ID NO: 14722 - DNA, 20 bp, Homo Sapiens
tttgtcacagggactgaaaa

SEQ ID NO: 14723 - DNA, 20 bp, Homo Sapiens
ttgtcacagggactgaaaac

SEQ ID NO: 14724 - DNA, 20 bp, Homo Sapiens
tgtcacagggactgaaaacc

SEQ ID NO: 14725 - DNA, 20 bp, Homo Sapiens
gtcacagggactgaaaacct

SEQ ID NO: 14726 - DNA, 20 bp, Homo Sapiens
tcacagggactgaaaacctc

SEQ ID NO: 14727 - DNA, 20 bp, Homo Sapiens
cacagggactgaaaacctct

SEQ ID NO: 14728 - DNA, 20 bp, Homo Sapiens
acagggactgaaaacctctc

SEQ ID NO: 14729 - DNA, 20 bp, Homo Sapiens
cagggactgaaaacctctcc

SEQ ID NO: 14730 - DNA, 20 bp, Homo Sapiens
agggactgaaaacctctcct

SEQ ID NO: 14731 - DNA, 20 bp, Homo Sapiens
gggactgaaaacctctcctc

SEQ ID NO: 14732 - DNA, 20 bp, Homo Sapiens
ggactgaaaacctctcctca

SEQ ID NO: 14733 - DNA, 20 bp, Homo Sapiens
gactgaaaacctctcctcat

SEQ ID NO: 14734 - DNA, 20 bp, Homo Sapiens
actgaaaacctctcctcatg

SEQ ID NO: 14735 - DNA, 20 bp, Homo Sapiens
ctgaaaacctctcctcatgt

SEQ ID NO: 14736 - DNA, 20 bp, Homo Sapiens
tgaaaacctctcctcatgtt

SEQ ID NO: 14737 - DNA, 20 bp, Homo Sapiens
gaaaacctctcctcatgttc

SEQ ID NO: 14738 - DNA, 20 bp, Homo Sapiens
aaaacctctcctcatgttct

SEQ ID NO: 14739 - DNA, 20 bp, Homo Sapiens
aaacctctcctcatgttctg

SEQ ID NO: 14740 - DNA, 20 bp, Homo Sapiens
aacctctcctcatgttctgc

SEQ ID NO: 14741 - DNA, 20 bp, Homo Sapiens
acctctcctcatgttctgct

SEQ ID NO: 14742 - DNA, 20 bp, Homo Sapiens
cctctcctcatgttctgctt

SEQ ID NO: 14743 - DNA, 20 bp, Homo Sapiens
ctctcctcatgttctgcttt

SEQ ID NO: 14744 - DNA, 20 bp, Homo Sapiens
tctcctcatgttctgctttc

SEQ ID NO: 14745 - DNA, 20 bp, Homo Sapiens
ctcctcatgttctgctttcg

SEQ ID NO: 14746 - DNA, 20 bp, Homo Sapiens
tcctcatgttctgctttcga

SEQ ID NO: 14747 - DNA, 20 bp, Homo Sapiens
cctcatgttctgctttcgat

SEQ ID NO: 14748 - DNA, 20 bp, Homo Sapiens
ctcatgttctgctttcgatt

SEQ ID NO: 14749 - DNA, 20 bp, Homo Sapiens
tcatgttctgctttcgattc

SEQ ID NO: 14750 - DNA, 20 bp, Homo Sapiens
catgttctgctttcgattcg

SEQ ID NO: 14751 - DNA, 20 bp, Homo Sapiens
atgttctgctttcgattcgt

SEQ ID NO: 14752 - DNA, 20 bp, Homo Sapiens
tgttctgctttcgattcgtt

SEQ ID NO: 14753 - DNA, 20 bp, Homo Sapiens
gttctgctttcgattcgtta

SEQ ID NO: 14754 - DNA, 20 bp, Homo Sapiens
ttctgctttcgattcgttaa

SEQ ID NO: 14755 - DNA, 20 bp, Homo Sapiens
tctgctttcgattcgttaag

SEQ ID NO: 14756 - DNA, 20 bp, Homo Sapiens
ctgctttcgattcgttaaga

SEQ ID NO: 14757 - DNA, 20 bp, Homo Sapiens
tgctttcgattcgttaagag

SEQ ID NO: 14758 - DNA, 20 bp, Homo Sapiens
gctttcgattcgttaagaga

SEQ ID NO: 14759 - DNA, 20 bp, Homo Sapiens
ctttcgattcgttaagagag

SEQ ID NO: 14760 - DNA, 20 bp, Homo Sapiens
tttcgattcgttaagagagc

SEQ ID NO: 14761 - DNA, 20 bp, Homo Sapiens
ttcgattcgttaagagagca

SEQ ID NO: 14762 - DNA, 20 bp, Homo Sapiens
tcgattcgttaagagagcaa

SEQ ID NO: 14763 - DNA, 20 bp, Homo Sapiens
cgattcgttaagagagcaac

SEQ ID NO: 14764 - DNA, 20 bp, Homo Sapiens
gattcgttaagagagcaaca

SEQ ID NO: 14765 - DNA, 20 bp, Homo Sapiens
attcgttaagagagcaacat

SEQ ID NO: 14766 - DNA, 20 bp, Homo Sapiens
ttcgttaagagagcaacatt

SEQ ID NO: 14767 - DNA, 20 bp, Homo Sapiens
tcgttaagagagcaacattt

SEQ ID NO: 14768 - DNA, 20 bp, Homo Sapiens
cgttaagagagcaacatttt

SEQ ID NO: 14769 - DNA, 20 bp, Homo Sapiens
gttaagagagcaacatttta

SEQ ID NO: 14770 - DNA, 20 bp, Homo Sapiens
ttaagagagcaacattttac

SEQ ID NO: 14771 - DNA, 20 bp, Homo Sapiens
taagagagcaacattttacc

SEQ ID NO: 14772 - DNA, 20 bp, Homo Sapiens
aagagagcaacattttaccc

SEQ ID NO: 14773 - DNA, 20 bp, Homo Sapiens
agagagcaacattttaccca

SEQ ID NO: 14774 - DNA, 20 bp, Homo Sapiens
gagagcaacattttacccac

SEQ ID NO: 14775 - DNA, 20 bp, Homo Sapiens
agagcaacattttacccaca

SEQ ID NO: 14776 - DNA, 20 bp, Homo Sapiens
gagcaacattttacccacac

SEQ ID NO: 14777 - DNA, 20 bp, Homo Sapiens
agcaacattttacccacaca

SEQ ID NO: 14778 - DNA, 20 bp, Homo Sapiens
gcaacattttacccacacac

SEQ ID NO: 14779 - DNA, 20 bp, Homo Sapiens
caacattttacccacacaca

SEQ ID NO: 14780 - DNA, 20 bp, Homo Sapiens
aacattttacccacacacag

SEQ ID NO: 14781 - DNA, 20 bp, Homo Sapiens
acattttacccacacacaga

SEQ ID NO: 14782 - DNA, 20 bp, Homo Sapiens
cattttacccacacacagat

SEQ ID NO: 14783 - DNA, 20 bp, Homo Sapiens
attttacccacacacagata

SEQ ID NO: 14784 - DNA, 20 bp, Homo Sapiens
ttttacccacacacagataa

SEQ ID NO: 14785 - DNA, 20 bp, Homo Sapiens
tttacccacacacagataaa

SEQ ID NO: 14786 - DNA, 20 bp, Homo Sapiens
ttacccacacacagataaag

SEQ ID NO: 14787 - DNA, 20 bp, Homo Sapiens
tacccacacacagataaagt

SEQ ID NO: 14788 - DNA, 20 bp, Homo Sapiens
acccacacacagataaagtt

SEQ ID NO: 14789 - DNA, 20 bp, Homo Sapiens
cccacacacagataaagttt

SEQ ID NO: 14790 - DNA, 20 bp, Homo Sapiens
ccacacacagataaagtttt

SEQ ID NO: 14791 - DNA, 20 bp, Homo Sapiens
cacacacagataaagttttc

SEQ ID NO: 14792 - DNA, 20 bp, Homo Sapiens
acacacagataaagttttcc

SEQ ID NO: 14793 - DNA, 20 bp, Homo Sapiens
cacacagataaagttttccc

SEQ ID NO: 14794 - DNA, 20 bp, Homo Sapiens
acacagataaagttttccct

SEQ ID NO: 14795 - DNA, 20 bp, Homo Sapiens
cacagataaagttttccctt

SEQ ID NO: 14796 - DNA, 20 bp, Homo Sapiens
acagataaagttttcccttg

SEQ ID NO: 14797 - DNA, 20 bp, Homo Sapiens
cagataaagttttcccttga

SEQ ID NO: 14798 - DNA, 20 bp, Homo Sapiens
agataaagttttcccttgag

SEQ ID NO: 14799 - DNA, 20 bp, Homo Sapiens
gataaagttttcccttgagg

SEQ ID NO: 14800 - DNA, 20 bp, Homo Sapiens
ataaagttttcccttgagga

SEQ ID NO: 14801 - DNA, 20 bp, Homo Sapiens
taaagttttcccttgaggaa

SEQ ID NO: 14802 - DNA, 20 bp, Homo Sapiens
aaagttttcccttgaggaaa

SEQ ID NO: 14803 - DNA, 20 bp, Homo Sapiens
aagttttcccttgaggaaac

SEQ ID NO: 14804 - DNA, 20 bp, Homo Sapiens
agttttcccttgaggaaaca

SEQ ID NO: 14805 - DNA, 20 bp, Homo Sapiens
gttttcccttgaggaaacaa

SEQ ID NO: 14806 - DNA, 20 bp, Homo Sapiens
ttttcccttgaggaaacaac

SEQ ID NO: 14807 - DNA, 20 bp, Homo Sapiens
tttcccttgaggaaacaaca

SEQ ID NO: 14808 - DNA, 20 bp, Homo Sapiens
ttcccttgaggaaacaacag

SEQ ID NO: 14809 - DNA, 20 bp, Homo Sapiens
tcccttgaggaaacaacagc

SEQ ID NO: 14810 - DNA, 20 bp, Homo Sapiens
cccttgaggaaacaacagct

SEQ ID NO: 14811 - DNA, 20 bp, Homo Sapiens
ccttgaggaaacaacagctt

SEQ ID NO: 14812 - DNA, 20 bp, Homo Sapiens
cttgaggaaacaacagcttt

SEQ ID NO: 14813 - DNA, 20 bp, Homo Sapiens
ttgaggaaacaacagcttta

SEQ ID NO: 14814 - DNA, 20 bp, Homo Sapiens
tgaggaaacaacagctttaa

SEQ ID NO: 14815 - DNA, 20 bp, Homo Sapiens
gaggaaacaacagctttaaa

SEQ ID NO: 14816 - DNA, 20 bp, Homo Sapiens
aggaaacaacagctttaaaa

SEQ ID NO: 14817 - DNA, 20 bp, Homo Sapiens
ggaaacaacagctttaaaag

SEQ ID NO: 14818 - DNA, 20 bp, Homo Sapiens
gaaacaacagctttaaaaga

SEQ ID NO: 14819 - DNA, 20 bp, Homo Sapiens
aaacaacagctttaaaagaa

SEQ ID NO: 14820 - DNA, 20 bp, Homo Sapiens
aacaacagctttaaaagaaa

SEQ ID NO: 14821 - DNA, 20 bp, Homo Sapiens
acaacagctttaaaagaaaa

SEQ ID NO: 14822 - DNA, 20 bp, Homo Sapiens
caacagctttaaaagaaaaa

SEQ ID NO: 14823 - DNA, 20 bp, Homo Sapiens
aacagctttaaaagaaaaag

SEQ ID NO: 14824 - DNA, 20 bp, Homo Sapiens
acagctttaaaagaaaaaga

SEQ ID NO: 14825 - DNA, 20 bp, Homo Sapiens
cagctttaaaagaaaaagaa

SEQ ID NO: 14826 - DNA, 20 bp, Homo Sapiens
agctttaaaagaaaaagaaa

SEQ ID NO: 14827 - DNA, 20 bp, Homo Sapiens
gctttaaaagaaaaagaaaa

SEQ ID NO: 14828 - DNA, 20 bp, Homo Sapiens
ctttaaaagaaaaagaaaaa

SEQ ID NO: 14829 - DNA, 20 bp, Homo Sapiens
tttaaaagaaaaagaaaaaa

SEQ ID NO: 14830 - DNA, 20 bp, Homo Sapiens
ttaaaagaaaaagaaaaaaa

SEQ ID NO: 14831 - DNA, 20 bp, Homo Sapiens
taaaagaaaaagaaaaaaaa

SEQ ID NO: 14832 - DNA, 20 bp, Homo Sapiens
aaaagaaaaagaaaaaaaaa

SEQ ID NO: 14833 - DNA, 20 bp, Homo Sapiens
aaagaaaaagaaaaaaaaag

SEQ ID NO: 14834 - DNA, 20 bp, Homo Sapiens
aagaaaaagaaaaaaaaagt

SEQ ID NO: 14835 - DNA, 20 bp, Homo Sapiens
agaaaaagaaaaaaaaagtc

SEQ ID NO: 14836 - DNA, 20 bp, Homo Sapiens
gaaaaagaaaaaaaaagtct

SEQ ID NO: 14837 - DNA, 20 bp, Homo Sapiens
aaaaagaaaaaaaaagtctt

SEQ ID NO: 14838 - DNA, 20 bp, Homo Sapiens
aaaagaaaaaaaaagtcttt

SEQ ID NO: 14839 - DNA, 20 bp, Homo Sapiens
aaagaaaaaaaaagtctttg

SEQ ID NO: 14840 - DNA, 20 bp, Homo Sapiens
aagaaaaaaaaagtctttgg

SEQ ID NO: 14841 - DNA, 20 bp, Homo Sapiens
agaaaaaaaaagtctttggt

SEQ ID NO: 14842 - DNA, 20 bp, Homo Sapiens
gaaaaaaaaagtctttggta

SEQ ID NO: 14843 - DNA, 20 bp, Homo Sapiens
aaaaaaaaagtctttggtaa

SEQ ID NO: 14844 - DNA, 20 bp, Homo Sapiens
aaaaaaaagtctttggtaaa

SEQ ID NO: 14845 - DNA, 20 bp, Homo Sapiens
aaaaaaagtctttggtaaat

SEQ ID NO: 14846 - DNA, 20 bp, Homo Sapiens
aaaaaagtctttggtaaatg

SEQ ID NO: 14847 - DNA, 20 bp, Homo Sapiens
aaaaagtctttggtaaatgg

SEQ ID NO: 14848 - DNA, 20 bp, Homo Sapiens
aaaagtctttggtaaatggc

SEQ ID NO: 14849 - DNA, 20 bp, Homo Sapiens
aaagtctttggtaaatggca

SEQ ID NO: 14850 - DNA, 20 bp, Homo Sapiens
aagtctttggtaaatggcaa

SEQ ID NO: 14851 - DNA, 20 bp, Homo Sapiens
agtctttggtaaatggcaaa

SEQ ID NO: 14852 - DNA, 20 bp, Homo Sapiens
gtctttggtaaatggcaaaa

SEQ ID NO: 14853 - DNA, 20 bp, Homo Sapiens
tctttggtaaatggcaaaaa

SEQ ID NO: 14854 - DNA, 20 bp, Homo Sapiens
ctttggtaaatggcaaaaaa

SEQ ID NO: 14855 - DNA, 20 bp, Homo Sapiens
tttggtaaatggcaaaaaaa

SEQ ID NO: 14856 - DNA, 20 bp, Homo Sapiens
ttggtaaatggcaaaaaaaa

SEQ ID NO: 14857 - DNA, 20 bp, Homo Sapiens
tggtaaatggcaaaaaaaaa

SEQ ID NO: 14858 - DNA, 20 bp, Homo Sapiens
ggtaaatggcaaaaaaaaaa

SEQ ID NO: 14859 - DNA, 20 bp, Homo Sapiens
gtaaatggcaaaaaaaaaaa

SEQ ID NO: 14860 - DNA, 20 bp, Homo Sapiens
taaatggcaaaaaaaaaaaa

SEQ ID NO: 14861 - DNA, 20 bp, Homo Sapiens
aaatggcaaaaaaaaaaaaa

SEQ ID NO: 14862 - DNA, 20 bp, Homo Sapiens
aatggcaaaaaaaaaaaaaa

SEQ ID NO: 14863 - DNA, 20 bp, Homo Sapiens
atggcaaaaaaaaaaaaaaa

SEQ ID NO: 14864 - DNA, 20 bp, Homo Sapiens
tggcaaaaaaaaaaaaaaaa

SEQ ID NO: 14865 - DNA, 20 bp, Homo Sapiens
ggcaaaaaaaaaaaaaaaaa

SEQ ID NO: 14866 - DNA, 20 bp, Homo Sapiens
gcaaaaaaaaaaaaaaaaaa

SEQ ID NO: 14867 - DNA, 20 bp, Homo Sapiens
caaaaaaaaaaaaaaaaaaa

SEQ ID NO: 14868 - DNA, 20 bp, Homo Sapiens
aaaaaaaaaaaaaaaaaaaa

SEQ ID NO: 14869 - DNA, 20 bp, Homo Sapiens
aaaaaaaaaaaaaaaaaaaa

SEQ ID NO: 14870 - DNA, 20 bp, Homo Sapiens
aaaaaaaaaaaaaaaaaaaa

SEQ ID NO: 14871 - DNA, 20 bp, Homo Sapiens
aaaaaaaaaaaaaaaaaaaa

SEQ ID NO: 14872 - DNA, 20 bp, Homo Sapiens
aaaaaaaaaaaaaaaaaaaa

1. A composition comprising a nucleic acid sequence comprising a guide RNA (gRNA) sequence that specifically binds a target RNA sequence, wherein the target RNA sequence encodes a protein component of an adaptive immune response, and wherein the gRNA sequence comprises a spacer sequence comprising a portion of a nucleic acid sequence encoding the protein component, and wherein the protein component is selected from the group consisting of Beta-2-microglobulin (β2M), Human Leukocyte Antigen A (HLA-A), Human Leukocyte Antigen B (HLA-B), Human Leukocyte Antigen C (HLA-C), Cluster of Differentiation 28 (CD28), Cluster of Differentiation 80 (CD80), Cluster of Differentiation 86 (CD86), Inducible T-cell Costimulator (ICOS), ICOS Ligand (ICOSLG), OX40L, Interleukin 12 (IL12), and CC Chemokine Receptor 7 (CCR7).

2. The composition of claim 1, wherein the adaptive immune response is selected from the group consisting of type I major histocompatibility complex (MHC I), type II major histocompatibility complex (MHC II), T-cell receptor (TCR), costimulatory molecule and a combination thereof.

3. The composition of claim 1, wherein the spacer sequence is about 20 or 21 nucleotides in length.

4. The composition of claim 1, wherein the spacer sequence and the target RNA sequence are reverse complements of one another.

5. The composition of claim 1, wherein the gRNA sequence comprises a scaffold sequence that specifically binds to a CRISPR/Cas polypeptide or portion thereof.

6. The composition of claim 5, wherein the CRISPR/Cas polypeptide or portion thereof is selected from the group consisting of Cas9, Cpf1 , Cas13a, Cas13b, Cas13c and CasRX/Cas13d, wherein the CRISPR/Cas polypeptide has native, reduced or null activity.

7. The composition of claim 1, wherein the nucleic acid sequence comprises a promoter which drives expression of the gRNA sequence.

8. The composition of claim 7, wherein the promoter is selected from the group consisting of a polymerase III promoter and a tRNA promoter.

9. The composition of claim 8, wherein the polymerase III promoter is a U6 promoter.

10. The composition of claim 1, wherein the spacer sequence is a first spacer sequence that specifically binds a first target RNA sequence, and wherein the composition further comprises a second spacer sequence which specifically binds a second target RNA sequence, wherein the first spacer sequence and the second spacer sequence bind different target RNA sequences.

11. The composition of claim 10, wherein the gRNA sequence is a first gRNA sequence, and wherein the second spacer sequence is comprised within a second gRNA sequence.

12. The composition of claim 10, wherein the second target RNA sequence encodes a protein component of an adaptive immune response.

13. The composition of claim 10, wherein the second spacer sequence comprises a portion of a nucleic acid sequence encoding a protein component is selected from the group consisting of Beta-2-microglobulin (β2M), Human Leukocyte Antigen A (HLA-A), Human Leukocyte Antigen B (HLA-B), Human Leukocyte Antigen C (HLA-C), Cluster of Differentiation 28 (CD28), Cluster of Differentiation 80 (CD80), Cluster of Differentiation 86 (CD86), Inducible T-cell Costimulator (ICOS), ICOS Ligand (ICOSLG), OX40L, Interleukin 12 (IL12), and CC Chemokine Receptor 7 (CCR7).

14. The composition of claim 10, wherein the second spacer sequence comprises at least 1, 2, 3, 4, 5, 6, or 7 repeats of a nucleic acid sequence selected from the group consisting of: CUG (SEQ ID NO: 18), CCUG (SEQ ID NO: 19), CAG (SEQ ID NO: 80), GGGGCC (SEQ ID NO: 81), and a combination thereof.

15. A composition comprising a nucleic acid sequence comprising: (a) a first guide RNA (gRNA) sequence that specifically binds a first target RNA sequence, and (b) a second gRNA that specifically binds a second target RNA sequence, wherein the first target RNA sequence encodes a protein component of an adaptive immune response, and wherein the first gRNA sequence comprises a spacer sequence comprising a portion of a nucleic acid sequence encoding the protein component, and wherein the protein component is selected from the group consisting of Beta-2-microglobulin (β2M), Human Leukocyte Antigen A (HLA-A), Human Leukocyte Antigen B (HLA-B), Human Leukocyte Antigen C (HLA-C), Cluster of Differentiation 28 (CD28), Cluster of Differentiation 80 (CD80), Cluster of Differentiation 86 (CD86), Inducible T-cell Costimulator (ICOS), ICOS Ligand (ICOSLG), OX40L, Interleukin 12 (IL12), and CC Chemokine Receptor 7 (CCR7).

16.-17. (canceled)

18. A composition comprising a nucleic acid sequence comprising: (a) a first guide RNA (gRNA) that specifically binds a first target RNA sequence within a first RNA molecule, wherein the first target RNA sequence encodes a protein component of an adaptive immune response (b) a second guide RNA (gRNA) that specifically binds a second target RNA sequence within a second RNA molecule and (c) a nucleic acid sequence encoding a fusion protein, wherein the fusion protein comprises a first RNA-binding polypeptide a second RNA-binding polypeptide, wherein neither the first RNA-binding polypeptide nor the second RNA-binding polypeptide comprises a significant DNA-nuclease activity, wherein the first RNA-binding polypeptide and the second RNA-binding polypeptide are not identical, and wherein the second RNA-binding polypeptide comprises an RNA-nuclease activity.

19. The composition of claim 18, wherein the first gRNA sequence comprises a spacer sequence comprising a portion of a nucleic acid sequence encoding a protein selected from the group consisting of Beta-2-microglobulin (β2M), HLA-A, HLA-B, HLA-C, CD28, CD80, CD86, ICOSLG, OX40L, IL12, and CCR7.

20.-26. (canceled)

27. A vector comprising the composition of claim 18.

28. The vector of claim 27, wherein the vector is selected from the group consisting of: adeno-associated virus, retrovirus, lentivirus, adenovirus, nanoparticle, micelle, liposome, lipoplex, polymersome, polyplex, and dendrimer.

29. (canceled)

30. The composition of claim 18, wherein the second RNA-binding polypeptide is selected from the group consisting of: RNAse1, RNAse4, RNAse6, RNAse7, RNAse8, RNAse2, RNAse6PL, RNAseL, RNAseT2, RNAse11, RNAseT2-like, NOB1, ENDOV, ENDOG, ENDOD1, hFEN1, hSLFN14, hLACTB2, APEX2, ANG, HRSP12, ZC3H12A, RIDA, PDL6, NTHL, KIAA0391, APEX1, AGO2, EXOG, ZC3H12D, ERN2, PELO, YBEY, CPSF4L, hCG_2002731, ERCC1, RAC1, RAA1, RAB1, DNA2, F1135220, F1113173, ERCC4, RNAse1(K41R), RNAse1(K41R, D121E), RNAsel(K41R, D121E, H119N), RNAsel(H119N), RNAsel(R39D, N67D, N88A, G89D, R91D, H119N), RNAsel(R39D, N67D, N88A, G89D, R91D, H119N, K41R, D121E), RNAsel(R39D, N67D, N88A, G89D, R91D), TENM1, TENM2, RNAseK, TALEN, ZNF638, and hSMG6 PIN.
